(19) United States
(12) Patent Application Publication
(10) Pub. No.: US 2014/0179620 A1
(43) Pub. Date: Jun. 26, 2014

(54) GENE EXPRESSION MARKERS FOR INFLAMMATORY BOWEL DISEASE

(71) Applicant: GENENTECH, INC., South San Francisco, CA (US)

(72) Inventors: Alexander R. Abbas, San Carlos, CA (US); Hilary Clark, San Francisco, CA (US); Lauri Diehl, Los Altos, CA (US); Charles Lees, Linlithgow (GB); Colin L. Noble, Edinburgh (GB); Jack Satsangi, Edinburgh (GB)

(73) Assignee: GENENTECH, INC., South San Francisco, CA (US)

(21) Appl. No.: 13/964,861

(22) Filed: Aug. 12, 2013

Related U.S. Application Data
(63) Continuation of application No. 12/324,783, filed on Nov. 26, 2008, now abandoned.
Application No. 12/324,783 is a continuation-in-part of application No. 12/125,724, filed on May 22, 2008, now abandoned.

(51) Int. Cl. C12Q 1/68; G01N 33/564

(52) U.S. Cl. CPC C12Q 1/6883; G01N 33/564
USPC 514/20.5; 435/7.1; 435/6.11; 435/6.12; 435/7.21; 435/7.4; 435/7.92; 506/9; 506/2; 514/353

(57) ABSTRACT

The present invention relates to methods of gene expression profiling for inflammatory bowel disease pathogenesis, in which the differential expression in a test sample from a mammalian subject of one or more IBD markers relative to a control is determined, wherein the differential expression in the test sample is indicative of an IBD in the mammalian subject from which the test sample was obtained.

### CROSS-REFERENCE TO RELATED APPLICATIONS

[0001] This application claims priority under Section 119(e) and the benefit of U.S. Provisional Application Ser. No. 60/991,203 filed Nov. 29, 2007, U.S. Provisional Application Ser. No. 61/192,268 filed Sep. 17, 2008, the entire disclosures of which are incorporated herein by reference in their entirety. The application also claims priority under Section 119(e) and the benefit of U.S. Provisional Application Ser. No. 60/190,689 filed Aug. 28, 2008.

[0002] This application is a continuation application of U.S. patent application Ser. No. 12/324,783, filed Nov. 26, 2008 (co-pending), which claims priority under Section 119(e) and the benefit of U.S. Provisional Application Ser. No. 60/991,203 filed Nov. 29, 2007, U.S. Provisional Application Ser. No. 61/190,689 filed Aug. 28, 2008, and U.S. Provisional Application Ser. No. 61/192,268 filed Sep. 17, 2008. This application also claims priority under 35 USC §120 to, and is a continuation-in-part of, U.S. Non-provisional application Ser. No. 12/125,724 filed May 22, 2008.

### SEQUENCE LISTING

[0003] The instant application contains a Sequence Listing which has been submitted in ASCII format via EFS-Web and is hereby incorporated by reference in its entirety. Said ASCII copy, created on Dec. 8, 2011, is named GNE238US.txt and is 807,225 bytes in size.

### BACKGROUND OF THE INVENTION

[0004] 1. Field of the Invention

[0005] The present invention relates to gene expression profiles in inflammatory bowel disease pathogenesis, including use in the detection and diagnosis of inflammatory bowel disease.

[0006] 2. Description of Related Art

[0007] Immune related and inflammatory diseases are the manifestation or consequence of fairly complex, often multiple interconnected biological pathways which in normal physiology are critical to respond to insult or injury, initiate repair from insult or injury, and mount innate and acquired defense against foreign organisms. Disease or pathology occurs when these normal physiological pathways cause additional insult or injury either as directly related to the intensity of the response, as a consequence of abnormal regulation or excessive stimulation, as a reaction to self, or as a combination of these.

[0008] Though the genesis of these diseases often involves multistep pathways and often multiple different biological systems/pathways, intervention at critical points in one or more of these pathways can have an ameliorative or therapeutic effect. Therapeutic intervention can occur by either antagonism of a detrimental process/pathway or stimulation of a beneficial process/pathway.

[0009] Many immune related diseases are known and have been extensively studied. Such diseases include immune-mediated inflammatory diseases, non-immune-mediated inflammatory diseases, infectious diseases, immunodeficiency diseases, neoplasia, etc.

[0010] The term inflammatory bowel disorder (“IBD”) describes a group of chronic inflammatory disorders of unknown causes in which the intestine (bowel) becomes inflamed, often causing recurring cramps or diarrhea. The prevalence of IBD in the US is estimated to be about 200 per 100,000 population. Patients with IBD can be divided into two major groups, those with ulcerative colitis (“UC”) and those with Crohn's disease (“CD”). Both UC and CD are chronic relapsing diseases and are complex clinical entities that occur in genetically susceptible individuals who are exposed to as yet poorly defined environmental stimuli. (Bonen and Cho, Gastroenterology. 2003; 124:521-536; Gaya et al. Lancet. 2006; 367:1271-1284).

[0011] Although the cause of IBD remains unknown, several factors such as genetic, infectious and immunologic susceptibility have been implicated. IBD is much more common in Caucasians, especially those of Jewish descent. The chronic inflammatory nature of the condition has prompted an intense search for a possible infectious cause. Although agents have been found which stimulate acute inflammation, none has been found to cause the chronic inflammation associated with IBD. The hypothesis that IBD is an autoimmune disease is supported by the previously mentioned extraintestinal manifestation of IBD as joint arthritis, and the known positive response to IBD by treatment with therapeutic agents such as adrenal glucocorticoids, cyclosporine and azathioprine, which are known to suppress immune response. In addition, the GI tract, more than any other organ of the body, is continuously exposed to potential antigenic substances such as proteins from food, bacterial byproducts (LPS), etc.

[0012] There is sufficient overlap in the diagnostic criteria for UC and CD that it is sometimes impossible to say which a given patient has; however, the type of lesion typically seen is different, as is the localization. UC mostly appears in the colon, proximal to the rectum, and the characteristic lesion is a superficial ulcer of the mucosa; CD can appear anywhere in the bowel, with occasional involvement of stomach, esophagus and duodenum, and the lesions are usually described as extensive linear fissures.

[0013] The current therapy of IBD usually involves the administration of antiinflammatory or immunosuppressive agents, such as sulfasalazine, corticosteroids, 6-mercaptopurine/azathioprine, or cyclosporine, which usually bring only partial results. If anti-inflammatory/immunosuppressive therapies fail, colectomies are the last line of defense. The typical operation for CD not involving the rectum is resection (removal of a diseased segment of bowel) and anastomosis (reconnection) without an ostomy. Sections of the small or large intestine may be removed. About 30% of CD patients will need surgery within the first year after diagnosis. In the subsequent years, the rate is about 5% per year. Unfortunately, CD is characterized by a high rate of recurrence; about 5% of patients need a second surgery each year after initial surgery.

[0014] Refining a diagnosis of inflammatory bowel disease involves evaluating the progression status of the diseases using standard classification criteria. The classification systems used in IBD include the Truelove and Witts Index (Truelove S. C. and Witts, L. J. Br Med J. 1955; 2:1041-1048), which classifies colitis as mild, moderate, or severe, as well as Lennard-Jones. (Lennard-Jones J E. Scand J Gastroenterol Suppl 1989; 170:2-6) and the simple clinical colitis activity index (SCCAI). (Walmsley et. al. Gut. 1998; 43:29-32) These systems track such variables as daily bowel movements, rectal bleeding, temperature, heart rate, hemoglobin levels, erythrocyte sedimentation rate, weight, hematocrit score, and the level of serum albumin.

[0015] In approximately 10-15% of cases, a definitive diagnosis of ulcerative colitis or Crohn's disease cannot be made and such cases are often referred to as “indeterminate colitis.” Two antibody detection tests are available that can help the diagnosis, each of which assays for antibodies in the blood. The antibodies are “perinuclear anti-neutrophil antibody” (pANCA) and “anti-Saccharomyces cervisiae antibody” (ASCA). Most patients with ulcerative colitis have the pANCA antibody but not the ASCA antibody, while most patients with Crohn's disease have the ASCA antibody but not the pANCA antibody. However, these two tests have shortcomings as some patients have neither antibody and some Crohn's disease patients may have only the pANCA antibody. For clinical practice, a reliable test that would indicate the presence and/or progression of an IBD based on molecular markers rather than the measurement of a multitude of variables would be useful for identifying and/or treating individuals with an IBD. Hypothesis free, linkage and association studies have identified genetic loci that have been associated with UC, notably the MHC region on chromosome 6, (Rioux et al. Am J Hum Genet. 2000; 66:1863-1870; Stokkers et al. Gut. 1999; 45:395-401; Van Heel et al. Hum Mol. Genet. 2004; 13:763-770) the IBD2 locus on chromosome 12 (Parkes et al. Am J Hum Genet. 2000; 67:1605-1610; Satsangi et al. Nat. Genet. 1996; 14:199-202) and the IBD5 locus on chromosome 5. (Giallourakis et. al. Am J. Hum Genet. 2003; 73:205-211; Palmieri et. al Aliment Pharmacol Ther. 2006; 23:497-506; Russell et. al. Gut. 2006; 55:1114-1123; Waller et. al. Gut. 2006; 55:809-814) Following a UK wide linkage scan identifying a putative loci of association for UC on chromosome 7q, further studies have implicated variants in the ABCB1 (MDR1) gene which is involved in cellular detoxification with UC. (Satsangi et. al. Nat. Genet. 1996; 14:199-202; Brant et. al. Am J Hum Genet. 2003; 73:1282-1292; Ho et. al. Gastroenterology. 2005; 128:288-296)

[0016] A complementary approach towards the identification and understanding of the complex gene-gene and gene-environment relationships that result in the chronic intestinal inflammation observed in inflammatory bowel disease (IBD) is microarray gene expression analysis. Microarrays allow a comprehensive picture of gene expression at the tissue and cellular level, thus helping understand the underlying patho-physiological processes. (Stoughton et. al. Annu Rev Biochem. 2005; 74:53-82) Microarray analysis was first applied to patients with IBD in 1997, comparing expression of 96 genes in surgical resections of patients with CD to synovial tissue of patients with rheumatoid arthritis. (Heller et. al. Proc Natl Acad Sci USA. 1997; 94:2150-2155) Further studies using microarray platforms to interrogate surgical specimens from patients with IBD identified an number of novel genes that were differentially regulated when diseased samples were compared to controls. (Dieckgraefe et. al. Physiol Genomics. 2000; 4:1-11; Lawrance et. al. Hum Mol. Genet. 2001; 10:445-456)

[0017] A complementary approach towards the identification and understanding of the complex gene-gene and gene-environment relationships that result in the chronic intestinal inflammation observed in inflammatory bowel disease (IBD) is microarray gene expression analysis. Microarrays allow a comprehensive picture of gene expression at the tissue and cellular level, thus helping understand the underlying patho-physiological processes. (Stoughton et. al. Annu Rev Biochem. 2005; 74:53-82) Microarray analysis was first applied to patients with IBD in 1997, comparing expression of 96 genes in surgical resections of patients with CD to synovial tissue of patients with rheumatoid arthritis. (Heller et. al. Proc Natl Acad Sci USA. 1997; 94:2150-2155) Further studies using microarray platforms to interrogate surgical specimens from patients with IBD identified a number of novel genes that were differentially regulated when diseased samples were compared to controls. (Dieckgraefe et. al. Physiol Genomics. 2000; 4:1-11; Lawrance et. al. Hum Mol. Genet. 2001; 10:445-456)

[0018] Endoscopic pinch mucosal biopsies have allowed investigators to microarray tissue from a larger range of patients encompassing those with less severe disease. Langmann et. al. used microarray technology to analyze 22,283 genes in biopsy specimens from macroscopically non affected areas of the colon and terminal ileum. (Langmann et. al. Gastroenterology. 2004; 127:26-40) Genes which were involved in cellular detoxification and biotransformation (Pregnane X receptor and MDR1) were significantly downregulated in the colon of patients with UC, however, there was no change in the expression of these genes in the biopsies from patients with CD. Costello and colleagues (Costello et. al. PLoS Med. 2005; 2:e199) looked at the expression of 33792 sequences in endoscopic sigmoid colon biopsies obtained from healthy controls, patients with CD and UC. A number of sequences representing novel proteins were differentially regulated and in silico analysis suggested that these proteins had putative functions related to disease pathogenesis—transcription factors, signaling molecules and cell adhesion.

[0019] In a study of patients with UC, Okahara et al. (Aliment Pharmacol Ther. 2005; 21:1091-1097) observed that (migration inhibitory factor-related protein 14 (MRP14), growth-related oncogene gamma (GROγ) and serum amyloid A1 (SAA1) were upregulated where as TIMP1 and elfin were down regulated in the inflamed biopsies when compared to the non-inflamed biopsies. When observing 41 chemokines and 21 chemokine receptors, Puleston et al demonstrated that chemokines CXCLs 1-3 and 8 and CCL20 were upregulated in active colonic CD and UC. (Aliment Pharmacol Ther. 2005; 21:109-120) Overall these studies illustrate the heterogeneity of early microarray platforms and tissue collection. However, despite these problems differential expression of a number of genes was consistently observed.

[0020] Despite the above identified advances in IBD research, there is a great need for additional diagnostic and therapeutic agents capable of detecting IBD in a mammal and for effectively treating this disorder. Accordingly, the present invention provides polynucleotides and polypeptides that are overexpressed in IBD as compared to normal tissue, and methods of using those polypeptides, and their encoding nucleic acids, for to detect or diagnose the presence of an IBD in mammalian subjects and subsequently to treat those subjects in which an IBD is detected with suitable IBD therapeutic agents.

[0021] The present invention provides methods for detecting the presence of and determining the progression of inflammatory bowel disease (IBD), including ulcerative colitis (UC) and Crohn's disease (CD).

[0022] The invention disclosed herein provides methods and assays examining expression of one or more gene expression markers in a mammalian tissue or cell sample, wherein the expression of one or more such biomarkers is predictive of whether the mammalian subject from which the tissue or cell sample was taken is more likely to have an IBD. In various embodiments of the invention, the methods and assays examine the expression of gene expression markers such as those listed in Tables 1, 2, and 3 and determine whether expression is higher or lower than a control sample.

[0023] These and further embodiments of the present invention will be apparent to those of ordinary skill in the art.

### SUMMARY OF THE INVENTION

[0024] In one aspect, the invention concerns a method of detecting or diagnosing an inflammatory bowel disease (IBD) in a mammalian subject comprising determining, in a biological sample obtained from the subject, that expression levels of (i) one or more nucleic acids encoding one or more polypeptides selected from Tables 1, 2, or 3, or (ii) RNA transcripts or their expression products of one or more genes selected from Tables 1, 2, or 3, is different relative to the expression level in a control, wherein the difference in expression indicates the subject is more likely to have an IBD.

[0025] In one embodiment, the methods of diagnosing or detecting the presence of an IBD in a mammalian subject comprise determining that the expression level of (i) one or more nucleic acids encoding one or more polypeptides selected from Tables 1A, 2, or 3A; or (ii) RNA transcripts or expression products thereof of one or more genes selected from Tables 1A, 2 or 3A in a test sample obtained from the subject is higher relative to the level of expression in a control, wherein the higher level of expression is indicative of the presence of an IBD in the subject from which the test sample was obtained.

[0026] In another embodiment, the methods of diagnosing or detecting the presence of an IBD in a mammalian subject comprise determining that the expression level of (i) one or more nucleic acids encoding one or more polypeptides selected from Tables 1B or 3B; or (ii) RNA transcripts or expression products thereof of one or more genes selected from Tables 1B or 3B in a test sample obtained from the subject is lower relative to the level of expression in a control, wherein the lower level of expression is indicative of the presence of an IBD in the subject from which the test sample was obtained.

[0027] In one aspect, the methods are directed to diagnosing or detecting a flare-up of an IBD in mammalian subject that was previously diagnosed with an IBD and is currently in remission. The subject may have completed treatment for the IBD or is currently undergoing treatment for the IBD. In one embodiment, the methods comprise determining, in a biological sample obtained from the mammalian subject, that the expression level of (i) one or more nucleic acids encoding one or more polypeptides selected from Tables 1, 2, or 3; or (ii) RNA transcripts or expression products thereof of one or more genes selected from Tables 1, 2 or 3 is different relative to the expression level in a control, wherein the difference in expression indicates the subject is more likely to have an IBD flareup. Alternatively, the test sample may be compared to a prior test sample of the mammalian subject, if available, obtained before, after, or at the time of the initial IBD diagnosis.

[0028] In all aspects, the mammalian subject preferably is a human patient, such as a human patient diagnosed with or at risk of developing an IBD. The subject may also be an IBD patient who has received prior treatment for an IBD but is at risk of a recurrence of the IBD.

[0029] For all aspects of the method of the invention, determining the expression level of one or more genes described herein (or one or more nucleic acids encoding polypeptide(s) expressed by one or more of such genes) may be obtained, for example, by a method of gene expression profiling. The method of gene expression profiling may be, for example, a PCR-based method.

[0030] In various embodiments, the diagnosis includes quantification of the expression level of (i) one or more nucleic acids encoding one or more polypeptides selected from Tables 1, 2, or 3; or (ii) RNA transcripts or expression products thereof of one or more genes selected from Tables 1, 2 or 3, such as by immunohistochemistry (1HC) and/or fluorescence in situ hybridization (FISH).

[0031] For all aspects of the invention, the expression levels of the genes may be normalized relative to the expression levels of one or more reference genes, or their expression products.

[0032] For all aspects of the invention, the method may further comprise determining evidence of the expression levels of at least two, three, four, five, six, seven, eight, nine, ten, eleven, twelve, thirteen, fourteen, fifteen, sixteen, seventeen, eighteen, nineteen, or twenty of said genes, or their expression products.

[0033] In another aspect, the methods of present invention also contemplate the use of a “panel” of such genes (i.e. IBD markers as disclosed herein) based on the evidence of their level of expression. In some embodiments, the panel of IBD markers will include at least one, two, three, four, five, six, seven, eight, nine, ten, eleven, twelve, thirteen, fourteen, fifteen, sixteen, seventeen, eighteen, nineteen or twenty IBD markers. The panel may include an IBD marker that is overexpressed in IBD relative to a control, an IBD marker that is underexpressed in IBD relative to a control, or IBD markers that are both overexpressed and underexpressed in IBD relative to a control. Such panels may be used to screen a mammalian subject for the differential expression of one or more IBD markers in order to make a determination on whether an IBD is present in the subject.

[0034] In one embodiment, the IBD markers that make up the panel are selected from Tables 1, 2, and 3. In a preferred embodiment, the methods of diagnosing or detecting the presence of an IBD in a mammalian subject comprise determining a differential expression level of RNA transcripts or expression products thereof from a panel of IBD markers in a test sample obtained from the subject relative to the level of expression in a control, wherein the differential level of expression is indicative of the presence of an IBD in the subject from which the test sample was obtained. The differential expression in the test sample may be higher and/or lower relative to a control as discussed herein.

[0035] For all aspects of the invention, the method may further comprise the step of creating a report summarizing said prediction.

[0036] For all aspects, the IBD diagnosed or detected according to the methods of the present invention is Crohn's disease (CD), ulcerative colitis (UC), or both CD and UC.

[0037] For all aspects of the invention, the test sample obtained from a mammalian subject may be derived from a colonic tissue biopsy. In a preferred embodiment, the biopsy is a tissue selected from the group consisting of terminal ileum, the ascending colon, the descending colon, and the sigmoid colon. In other preferred embodiments, the biopsy is from an inflamed colonic area or from a non-inflamed colonic area. The inflamed colonic area may be acutely inflamed or chronically inflamed.

[0038] For all aspects, determination of expression levels may occur at more than one time. For all aspects of the invention, the determination of expression levels may occur before the patient is subjected to any therapy before and/or after any surgery. In some embodiments, the determining step is indicative of a recurrence of an IBD in the mammalian subject following surgery or indicative of a flare-up of said IBD in said mammalian subject. In a preferred embodiment, the IBD is Crohn's disease.

[0039] In another aspect, the present invention concerns methods of treating a mammalian subject in which the presence of an IBD has been detected by the methods described herein. For example, following a determination that a test sample obtained from the mammalian subject exhibits differential expression relative to a control of one or more of the RNA transcripts or the corresponding gene products of an IBD marker described herein, the mammalian subject may be administered an IBD therapeutic agent.

[0040] In one embodiment, the methods of treating an IBD in a mammalian subject in need thereof, comprise (a) determining a differential level of expression of (i) one or more nucleic acids encoding one or more polypeptides selected from Tables 1, 2, or 3; or (ii) RNA transcripts or expression products thereof of one or more genes selected from Tables 1, 2 or 3 in a test sample obtained from said subject relative to the level of expression in a control, wherein said differential level of expression is indicative of the presence of an IBD in the subject from which the test sample was obtained; and (b) administering to said subject an effective amount of an IBD therapeutic agent. In a preferred embodiment, the methods of treating an IBD comprise (a) determining that the expression level of (i) one or more nucleic acids encoding one or more polypeptides selected from Tables 1A, 2, or 3A; or (ii) RNA transcripts or expression products thereof of one or more genes selected from Tables 1A, 2 or 3A in a test sample obtained from the subject is higher relative to the level of expression in a control, wherein the higher level of expression is indicative of the presence of an IBD in the subject from which the test sample was obtained; and (b) administering to said subject an effective amount of an IBD therapeutic agent. In another preferred embodiment, the methods of treating an IBD comprise (a) determining that the expression level of (i) one or more nucleic acids encoding one or more polypeptides selected from Tables 1B or 3B; or (ii) RNA transcripts or expression products thereof of one or more genes selected from Tables 1B or 3B in a test sample obtained from the subject is lower relative to the level of expression in a control, wherein the lower level of expression is indicative of the presence of an IBD in the subject from which the test sample was obtained. In some preferred embodiments, the IBD therapeutic agent is one or more of an aminosalicylate, a corticosteroid, and an immunosuppressive agent.

[0041] In one aspect, the panel of IBD markers discussed above is useful in methods of treating an IBD in a mammalian subject. In one embodiment, the mammalian subject is screened against the panel of markers and if the presence of an IBD is determined, IBD therapeutic agent(s) may be administered as discussed herein.

[0042] In a different aspect the invention concerns a kit comprising one or more of (1) extraction buffer/reagents and protocol; (2) reverse transcription buffer/reagents and protocol; and (3) qPCR buffer/reagents and protocol suitable for performing the methods of this invention. The kit may comprise data retrieval and analysis software.

[0043] In one embodiment, the gene whose differential expression is indicative of an IBD is GLI1. In another embodiment, the GLI1 gene is a GLI1 variant. In a preferred embodiment, the GLI1 variant is rs2228226C→G (Q1100E) as described in Example 4.

[0044] All publications mentioned herein are incorporated herein by reference to disclose and describe the methods and/or materials in connection with which the publications are cited. Publications cited herein are cited for their disclosure prior to the filing date of the present application. Nothing here is to be construed as an admission that the inventors are not entitled to antedate the publications by virtue of an earlier priority date or prior date of invention. Further the actual publication dates may be different from those shown and require independent verification.

### BRIEF DESCRIPTION OF DRAWINGS

[0045] FIG. 1 shows the histologically normal biopsies from control patients that were analysed by unsupervised hierarchical clustering.

[0046] FIGS. 2A and 2B shows the expression of defensins alpha 5 (A) and alpha 6 (B) in ulcerative colitis patients and controls.

[0047] FIGS. 3A and 3B shows the expression of the matrix metalloproteinases (MMPs) 3 (A) and 7 (B) in ulcerative colitis and controls.

[0048] FIG. 4A-D shows the real time PCR expression of SAA1(A), IL-8(B), defensin alpha 5(C), and defensin alpha 6(D) in control and ulcerative colitis inflamed and non-inflamed sigmoid colon biopsies.

[0049] FIG. 5A-D shows the real time PCR expression of MMP3(A), MMP7(B), S100A8(C), and TLR4(D) in control and ulcerative colitis inflamed and non-inflamed sigmoid colon biopsies.

[0050] FIG. 6 shows in situ hybridization of defensin alpha 5 in the terminal ileum and colon of patients with ulcerative colitis and controls.

[0051] FIG. 7 shows in situ hybridization of defensin alpha 6 in the terminal ileum and colon of patients with ulcerative colitis and controls.

[0052] FIGS. 8A and 8B depict the nucleic acid sequence (SEQ ID NO:1) encoding human DEFA6 polypeptide and the amino acid sequence of human DEFA6 polypeptide (SEQ ID NO:2).

[0053] FIGS. 9A and 9B depict the nucleic acid sequence (SEQ ID NO:3) encoding human DEFAS polypeptide and the amino acid sequence of human DEFAS polypeptide (SEQ ID NO:4). FIGS. 9C and 9D depict the nucleic acid sequence (SEQ ID NO:210) encoding human DEFB14 polypeptide and the amino acid sequence of human DEFB14 polypeptide (SEQ ID NO:211).

[0054] FIGS. 10A and 10B depict the nucleic acid sequence (SEQ ID NO:5) encoding human IL3RA polypeptide and the amino acid sequence of human IL3RA polypeptide (SEQ ID NO:6).

[0055] FIGS. 11A and 11B depict the nucleic acid sequence (SEQ ID NO:7) encoding human IL2RA polypeptide and the amino acid sequence of human IL2RA polypeptide (SEQ ID NO:8).

[0056] FIGS. 12A and 12B depict the nucleic acid sequence (SEQ ID NO:9) encoding human REG3G polypeptide and the amino acid sequence of human REG3G polypeptide (SEQ ID NO:10).

[0057] FIGS. 13A and 13B depict the nucleic acid sequence (SEQ ID NO:11) encoding human REG1B polypeptide and the amino acid sequence of human REG1B polypeptide (SEQ ID NO:12).

[0058] FIGS. 14A and 14B depict the nucleic acid sequence (SEQ ID NO:13) encoding human KCND3 polypeptide and the amino acid sequence of human KCND3 polypeptide (SEQ ID NO:14).

[0059] FIGS. 15A and 15B depict the nucleic acid sequence (SEQ ID NO:15) encoding human MIP-3a polypeptide and the amino acid sequence of human MIP-3a polypeptide (SEQ ID NO:16).

[0060] FIGS. 16A and 16B depict the nucleic acid sequence (SEQ ID NO:17) encoding human ECGF1 polypeptide and the amino acid sequence of human ECGF1 polypeptide (SEQ ID NO:18).

[0061] FIGS. 17A and 17B depict the nucleic acid sequence (SEQ ID NO:19) encoding human IL1B polypeptide and the amino acid sequence of human IL1B polypeptide (SEQ ID NO:20).

[0062] FIGS. 18A and 18B depict the nucleic acid sequence (SEQ ID NO:21) encoding human MIP2BGRO-g polypeptide and the amino acid sequence of human MIP2BGRO-g polypeptide (SEQ ID NO:22).

[0063] FIGS. 19A and 19B depict the nucleic acid sequence (SEQ ID NO:23) encoding human CXCL1 polypeptide and the amino acid sequence of human CXCL1 polypeptide (SEQ ID NO:24).

[0064] FIGS. 20A and 20B depict the nucleic acid sequence (SEQ ID NO:25) encoding human IAP1 polypeptide and the amino acid sequence of human IAP1 polypeptide (SEQ ID NO:26).

[0065] FIGS. 21A and 21B depict the nucleic acid sequence (SEQ ID NO:27) encoding human CASP5 polypeptide and the amino acid sequence of human CASP5 polypeptide (SEQ ID NO:28).

[0066] FIGS. 22A and 22B depict the nucleic acid sequence (SEQ ID NO:29) encoding human DMBT1 polypeptide and the amino acid sequence of human DMBT1 polypeptide (SEQ ID NO:30).

[0067] FIGS. 23A and 23B depict the nucleic acid sequence (SEQ ID NO:31) encoding human PCDH17 polypeptide and the amino acid sequence of human PCDH17 polypeptide (SEQ ID NO:32).

[0068] FIGS. 24A and 24B depict the nucleic acid sequence (SEQ ID NO:33) encoding human IFITM1 polypeptide and the amino acid sequence of human IFITM1 polypeptide (SEQ ID NO:34).

[0069] FIGS. 25A and 25B depict the nucleic acid sequence (SEQ ID NO:35) encoding human PDZK1IP1 polypeptide and the amino acid sequence of human PDZK1IP1 polypeptide (SEQ ID NO:36).

[0070] FIGS. 26A and 26B depict the nucleic acid sequence (SEQ ID NO:37) encoding human IRTA2 polypeptide and the amino acid sequence of human IRTA2 polypeptide (SEQ ID NO:38).

[0071] FIGS. 27A and 27B depict the nucleic acid sequence (SEQ ID NO:39) encoding human SLC40A1 polypeptide and the amino acid sequence of human SLC40A1 polypeptide (SEQ ID NO:40).

[0072] FIGS. 28A and 28B depict the nucleic acid sequence (SEQ ID NO:41) encoding human IGHV4-4 polypeptide and the amino acid sequence of human IGHV4-4 polypeptide (SEQ ID NO:42).

[0073] FIGS. 29A and 29B depict the nucleic acid sequence (SEQ ID NO:43) encoding human REG3G polypeptide and the amino acid sequence of human REG3G polypeptide (SEQ ID NO:44).

[0074] FIGS. 30A and 30B depict the nucleic acid sequence (SEQ ID NO:45) encoding human AQP9 polypeptide and the amino acid sequence of human AQP9 polypeptide (SEQ ID NO:46).

[0075] FIGS. 31A and 31B depict the nucleic acid sequence (SEQ ID NO:47) encoding human OLFM4 polypeptide and the amino acid sequence of human OLFM4 polypeptide (SEQ ID NO:48).

[0076] FIGS. 32A and 32B depict the nucleic acid sequence (SEQ ID NO:49) encoding human S100A9 polypeptide and the amino acid sequence of human S100A9 polypeptide (SEQ ID NO:50).

[0077] FIGS. 33A and 33B depict the nucleic acid sequence (SEQ ID NO:51) encoding human UNC5CL polypeptide and the amino acid sequence of human UNC5CL polypeptide (SEQ ID NO:52).

[0078] FIGS. 34A and 34B depict the nucleic acid sequence (SEQ ID NO:53) encoding human GPR110 polypeptide and the amino acid sequence of human GPR110 polypeptide (SEQ ID NO:54).

[0079] FIGS. 35A and 35B depict the nucleic acid sequence (SEQ ID NO:55) encoding human HLA-G polypeptide and the amino acid sequence of human HLA-G polypeptide (SEQ ID NO:56).

[0080] FIGS. 36A and 36B depict the nucleic acid sequence (SEQ ID NO:57) encoding human TAP1 polypeptide and the amino acid sequence of human TAP1 polypeptide (SEQ ID NO:58).

[0081] FIGS. 37A and 37B depict the nucleic acid sequence (SEQ ID NO:59) encoding human MAP3K8 polypeptide and the amino acid sequence of human MAP3K8 polypeptide (SEQ ID NO:60).

[0082] FIGS. 38A and 38B depict the nucleic acid sequence (SEQ ID NO:61) encoding human UBD|GABBR1 polypeptide and the amino acid sequence of human UBD|GABBR1 polypeptide (SEQ ID NO:62).

[0083] FIGS. 39A and 39B depict the nucleic acid sequence (SEQ ID NO:63) encoding human DHX57 polypeptide and the amino acid sequence of human DHX57 polypeptide (SEQ ID NO:64).

[0084] FIGS. 40A and 40B depict the nucleic acid sequence (SEQ ID NO:65) encoding human MA polypeptide and the amino acid sequence of human MApolypeptide (SEQ ID NO:66).

[0085] FIGS. 41A and 41B depict the nucleic acid sequence (SEQ ID NO:67) encoding human IGLJCOR18 polypeptide and the amino acid sequence of human IGUCOR18 polypeptide (SEQ ID NO:68).

[0086] FIGS. 42A and 42B depict the nucleic acid sequence (SEQ ID NO:69) encoding human TNF R superfamily, member 6b, decoy (TNFRSF6B) polypeptide and the amino acid sequence of human TNF R superfamily, member 6b, decoy (TNFRSF6B) polypeptide (SEQ ID NO:70).

[0087] FIGS. 43A and 43B depict the nucleic acid sequence (SEQ ID NO:71) encoding human SAA1 polypeptide and the amino acid sequence of human SAA1 polypeptide (SEQ ID NO:72).

[0088] FIGS. 44A and 44B depict the nucleic acid sequence (SEQ ID NO:73) encoding human TAP2 polypeptide and the amino acid sequence of human TAP2 polypeptide (SEQ ID NO:74).

[0089] FIGS. 45A and 45B depict the nucleic acid sequence (SEQ ID NO:75) encoding human PCAA17448 polypeptide and the amino acid sequence of human PCAA17448 polypeptide (SEQ ID NO:76).

[0090] FIGS. 46A and 46B depict the nucleic acid sequence (SEQ ID NO:77) encoding human LCN2 polypeptide and the amino acid sequence of human LCN2 polypeptide (SEQ ID NO:78).

[0091] FIGS. 47A and 47B depict the nucleic acid sequence (SEQ ID NO:79) encoding human ZBP1 polypeptide and the amino acid sequence of human ZBP1 polypeptide (SEQ ID NO:80).

[0092] FIGS. 48A and 48B depict the nucleic acid sequence (SEQ ID NO:81) encoding human TNIP3 polypeptide and the amino acid sequence of human TNIP3 polypeptide (SEQ ID NO:82).

[0093] FIGS. 49A and 49B depict the nucleic acid sequence (SEQ ID NO:83) encoding human ZC3H12A polypeptide and the amino acid sequence of human ZC3H12A polypeptide (SEQ ID NO:84).

[0094] FIGS. 50A and 50B depict the nucleic acid sequence (SEQ ID NO:85) encoding human CHI3L1 polypeptide and the amino acid sequence of human CHI3L1 polypeptide (SEQ ID NO:86).

[0095] FIGS. 51A and 51B depict the nucleic acid sequence (SEQ ID NO:87) encoding human FCGR3A polypeptide and the amino acid sequence of human FCGR3A polypeptide (SEQ ID NO:88).

[0096] FIGS. 52A and 52B depict the nucleic acid sequence (SEQ ID NO:89) encoding human SAMD9L polypeptide and the amino acid sequence of human SAMD9L polypeptide (SEQ ID NO:90).

[0097] FIGS. 53A and 53B depict the nucleic acid sequence (SEQ ID NO:91) encoding human MMP9 polypeptide and the amino acid sequence of human MMP9 polypeptide (SEQ ID NO:92).

[0098] FIGS. 54A and 54B depict the nucleic acid sequence (SEQ ID NO:93) encoding human MMP7 polypeptide and the amino acid sequence of human MMP7 polypeptide (SEQ ID NO:94).

[0099] FIGS. 55A and 55B depict the nucleic acid sequence (SEQ ID NO:95) encoding human BF polypeptide and the amino acid sequence of human BF polypeptide (SEQ ID NO:96).

[0100] FIGS. 56A and 56B depict the nucleic acid sequence (SEQ ID NO:97) encoding human S100P polypeptide and the amino acid sequence of human S100P polypeptide (SEQ ID NO:98).

[0101] FIGS. 57A and 57B depict the nucleic acid sequence (SEQ ID NO:99) encoding human GRO polypeptide and the amino acid sequence of human GRO polypeptide (SEQ ID NO:100).

[0102] FIGS. 58A and 58B depict the nucleic acid sequence (SEQ ID NO:101) encoding human INDO polypeptide and the amino acid sequence of human INDO polypeptide (SEQ ID NO:102).

[0103] FIGS. 59A and 59B depict the nucleic acid sequence (SEQ ID NO:103) encoding human TRIM22 polypeptide and the amino acid sequence of human TRIM22 polypeptide (SEQ ID NO:104).

[0104] FIGS. 60A and 60B depict the nucleic acid sequence (SEQ ID NO:105) encoding human SAA2 polypeptide and the amino acid sequence of human SAA2 polypeptide (SEQ ID NO:106).

[0105] FIGS. 61A and 61B depict the nucleic acid sequence (SEQ ID NO:107) encoding human NEU4 polypeptide and the amino acid sequence of human NEU4 polypeptide (SEQ ID NO:108).

[0106] FIGS. 62A and 62B depict the nucleic acid sequence (SEQ ID NO:109) encoding human IRTA2/FCRH5 polypeptide and the amino acid sequence of human IRTA2/FCRH5 polypeptide (SEQ ID NO:110).

[0107] FIGS. 63A and 63B depict the nucleic acid sequence (SEQ ID NO:111) encoding human IGLJCOR18 polypeptide and the amino acid sequence of human IGUCOR18 polypeptide (SEQ ID NO:112).

[0108] FIGS. 64A and 64B depict the nucleic acid sequence (SEQ ID NO:113) encoding human IGHV4-4 polypeptide and the amino acid sequence of human IGHV4-4 polypeptide (SEQ ID NO:114).

[0109] FIGS. 65A and 65B depict the nucleic acid sequence (SEQ ID NO:115) encoding human MMP9 polypeptide and the amino acid sequence of human MMP9 polypeptide (SEQ ID NO:116).

[0110] FIGS. 66A and 66B depict the nucleic acid sequence (SEQ ID NO:117) encoding human GRO polypeptide and the amino acid sequence of human GRO polypeptide (SEQ ID NO:118).

[0111] FIGS. 67A and 67B depict the nucleic acid sequence (SEQ ID NO:119) encoding human MIP2BGRO-g polypeptide and the amino acid sequence of human MIP2BGRO-g polypeptide (SEQ ID NO:120).

[0112] FIGS. 68A and 68B depict the nucleic acid sequence (SEQ ID NO:121) encoding human IL1B polypeptide and the amino acid sequence of human IL1B polypeptide (SEQ ID NO:122).

[0113] FIGS. 69A and 69B depict the nucleic acid sequence (SEQ ID NO:123) encoding human IL3RA polypeptide and the amino acid sequence of human IL3RA polypeptide (SEQ ID NO:124).

[0114] FIGS. 70A and 70B depict the nucleic acid sequence (SEQ ID NO:125) encoding human CASP1 polypeptide and the amino acid sequence of human CASP1 polypeptide (SEQ ID NO:126).

[0115] FIGS. 71A and 71B depict the nucleic acid sequence (SEQ ID NO:127) encoding human BV8 polypeptide and the amino acid sequence of human BV8 polypeptide (SEQ ID NO:128).

[0116] FIGS. 72A and 72B depict the nucleic acid sequence (SEQ ID NO:129) encoding human HDAC7A polypeptide and the amino acid sequence of human HDAC7A polypeptide (SEQ ID NO:130).

[0117] FIGS. 73A and 73B depict the nucleic acid sequence (SEQ ID NO:131) encoding human ACVRL1 polypeptide and the amino acid sequence of human ACVRL1 polypeptide (SEQ ID NO:132).

[0118] FIGS. 74A and 74B depict the nucleic acid sequence (SEQ ID NO:133) encoding human NR4A1 polypeptide and the amino acid sequence of human NR4A1 polypeptide (SEQ ID NO:134).

[0119] FIGS. 75A and 75B depict the nucleic acid sequence (SEQ ID NO:135) encoding human K5B polypeptide and the amino acid sequence of human K5B polypeptide (SEQ ID NO:136).

[0120] FIGS. 76A and 76B depict the nucleic acid sequence (SEQ ID NO:137) encoding human SILV polypeptide and the amino acid sequence of human SILV polypeptide (SEQ ID NO:138).

[0121] FIGS. 77A and 77B depict the nucleic acid sequence (SEQ ID NO:139) encoding human IRAK3 polypeptide and the amino acid sequence of human IRAK3 polypeptide (SEQ ID NO:140).

[0122] FIGS. 78A and 78B depict the nucleic acid sequence (SEQ ID NO:141) encoding human IL-4 polypeptide and the amino acid sequence of human IL-4 polypeptide (SEQ ID NO:142).

[0123] FIGS. 79A and 79B depict the nucleic acid sequence (SEQ ID NO:143) encoding human IL-13 polypeptide and the amino acid sequence of human IL-13 polypeptide (SEQ ID NO:144).

[0124] FIGS. 80A and 80B depict the nucleic acid sequence (SEQ ID NO:145) encoding human RAD50 polypeptide and the amino acid sequence of human RAD50 polypeptide (SEQ ID NO:146).

[0125] FIGS. 81A and 81B depict the nucleic acid sequence (SEQ ID NO:147) encoding human IL-5 polypeptide and the amino acid sequence of human IL-5 polypeptide (SEQ ID NO:148).

[0126] FIGS. 82A and 82B depict the nucleic acid sequence (SEQ ID NO:149) encoding human IRF1 polypeptide and the amino acid sequence of human IRF1 polypeptide (SEQ ID NO:150).

[0127] FIGS. 83A and 83B depict the nucleic acid sequence (SEQ ID NO:151) encoding human PDLIM4 polypeptide and the amino acid sequence of human PDLIM4 polypeptide (SEQ ID NO:152).

[0128] FIGS. 84A and 84B depict the nucleic acid sequence (SEQ ID NO:153) encoding human CSF2 polypeptide and the amino acid sequence of human CSF2 polypeptide (SEQ ID NO:154).

[0129] FIGS. 85A and 85B depict the nucleic acid sequence (SEQ ID NO:155) encoding human IL-3 polypeptide and the amino acid sequence of human IL-3 polypeptide (SEQ ID NO:156).

[0130] FIGS. 86A and 86B depict the nucleic acid sequence (SEQ ID NO:157) encoding human MMP3 polypeptide and the amino acid sequence of human MMP3 polypeptide (SEQ ID NO:158).

[0131] FIGS. 87A and 87B depict the nucleic acid sequence (SEQ ID NO:159) encoding human IL-8 polypeptide and the amino acid sequence of human IL-8 polypeptide (SEQ ID NO:160).

[0132] FIGS. 88A and 88B depict the nucleic acid sequence (SEQ ID NO:161) encoding human TLR4 polypeptide and the amino acid sequence of human TLR4 polypeptide (SEQ ID NO:162).

[0133] FIGS. 89A and 89B depict the nucleic acid sequence (SEQ ID NO:163) encoding human HLA-DRB 1 polypeptide and the amino acid sequence of human HLA-DRB 1 polypeptide (SEQ ID NO:164).

[0134] FIGS. 90A and 90B depict the nucleic acid sequence (SEQ ID NO:165) encoding human MMP19 polypeptide and the amino acid sequence of human MMP19 polypeptide (SEQ ID NO:166).

[0135] FIGS. 91A and 91B depict the nucleic acid sequence (SEQ ID NO:167) encoding human TIMP1 polypeptide and the amino acid sequence of human TIMP1 polypeptide (SEQ ID NO:168).

[0136] FIGS. 92A and 92B depict the nucleic acid sequence (SEQ ID NO:169) encoding human Elfin polypeptide and the amino acid sequence of human Elfin polypeptide (SEQ ID NO:170).

[0137] FIGS. 93A and 93B depict the nucleic acid sequence (SEQ ID NO:171) encoding human CXCL1 polypeptide and the amino acid sequence of human CXCL1 polypeptide (SEQ ID NO:172).

[0138] FIGS. 94A and 94B depict the nucleic acid sequence (SEQ ID NO:173) encoding human DKFZP586A0522 polypeptide and the amino acid sequence of human DFKZP586A0522 polypeptide (SEQ ID NO:174).

[0139] FIGS. 95A and 95B depict the nucleic acid sequence (SEQ ID NO:175) encoding human SLC39A5 polypeptide and the amino acid sequence of human SLC39A5 polypeptide (SEQ ID NO:176).

[0140] FIGS. 96A and 96B depict the nucleic acid sequence (SEQ ID NO:177) encoding human GLI-1 polypeptide and the amino acid sequence of human GLI-1 polypeptide (SEQ ID NO:178).

[0141] FIGS. 97A and 97B depict the nucleic acid sequence (SEQ ID NO:179) encoding human HMGA2 polypeptide and the amino acid sequence of human HMGA2 polypeptide (SEQ ID NO:180).

[0142] FIGS. 98A and 98B depict the nucleic acid sequence (SEQ ID NO:181) encoding human SLC22A5 polypeptide and the amino acid sequence of human SLC22A5 polypeptide (SEQ ID NO:182).

[0143] FIGS. 99A and 99B depict the nucleic acid sequence (SEQ ID NO:183) encoding human SLC22A4 polypeptide and the amino acid sequence of human SLC22A4 polypeptide (SEQ ID NO:184).

[0144] FIGS. 100A and 100B depict the nucleic acid sequence (SEQ ID NO:185) encoding human P4HA2 polypeptide and the amino acid sequence of human P4HA2 polypeptide (SEQ ID NO:186).

[0145] FIGS. 101A and 101B depict the nucleic acid sequence (SEQ ID NO:187) encoding human TSLP polypeptide and the amino acid sequence of human TSLP polypeptide (SEQ ID NO:188).

[0146] FIGS. 102A and 102B depict the nucleic acid sequence (SEQ ID NO:189) encoding human tubulin alpha 5/alpha 3 polypeptide and the amino acid sequence of human tubulin alpha 5/alpha 3 polypeptide (SEQ ID NO:190).

[0147] FIGS. 103A and 103B depict the nucleic acid sequence (SEQ ID NO:191) encoding human tubulin alpha 6 polypeptide and the amino acid sequence of human tubulin alpha 6 polypeptide (SEQ ID NO:192).

[0148] FIG. 104 shows a meta-analysis of non-synonymous GLI1 SNP rs2228226 in Scotland, Cambridge and Sweden using Mantel-Haenszel method.

[0149] FIG. 105A-E shows Q1100E disrupts a conserved region of the GLI1 protein (SEQ ID NOS:245-250) and reduces GLI1 transcriptional activity.

[0150] FIG. 106A-C shows expression of hedgehog (HH) signalling components in the healthy human adult colon (HC) and ulcerative colitis (UC).

[0151] FIG. 107A-C shows the results in which Gli1+/− animals show mortality, severe clinical symptoms, and profound weight loss after DSS treatment.

[0152] FIG. 108A-F shows Gli1+/− animals demonstrate more severe intestinal inflammation than WT littermates in response to DSS treatment.

[0153] FIG. 109A-B shows cytokine analysis of Gli1+/− and WT mice after DSS treatments demonstrates robust pro-inflammatory cytokine activation.

[0154] FIG. 110A-B shows the (A) nucleic acid sequence encoding human arrestin domain containing 5 (ARRDCS) (LOC342959) (SEQ ID NO:193) and the (B) amino acid sequence of human ARRDCS polypeptide (SEQ ID NO:194).

[0155] FIG. 111 shows the nucleic acid sequence corresponding to human ataxin 3-like (ATXN3L) (SEQ ID NO:195).

[0156] FIG. 112A-B shows the (A) nucleic acid sequence encoding human follicle stimulating hormone receptor (FSHR) (LOC92552) (SEQ ID NO:196) and (B) the amino acid sequence of human FSHR polypeptide (SEQ ID NO:197).

[0157] FIG. 113A-B shows the (A) nucleic acid sequence encoding human Platelet-derived growth factor receptor, alpha polypeptide (PDGFRA) (SEQ ID NO:198) and (B) the amino acid sequence of human PDGFRA polypeptide (SEQ ID NO:199).

[0158] FIG. 114A-B shows the (A) nucleic acid sequence encoding human transforming growth factor beta 3 (TGFB3) (SEQ ID NO:200) and (B) the amino acid sequence of human TGFB3 polypeptide (SEQ ID NO:201).

[0159] FIG. 115A-B shows the (A) nucleic acid sequence encoding human potassium channel tetramerisation domain containing 8 (KCTD8) (SEQ ID NO:202) and (B) the amino acid sequence of human KCTD8 polypeptide (SEQ ID NO:203).

[0160] FIG. 116A-B shows the (A) nucleic acid sequence encoding human transglutaminase 4 (TGM4) (SEQ ID NO:204) and (B) the amino acid sequence of human TGM4 polypeptide (SEQ ID NO:205).

[0161] FIG. 117A-B shows the (A) nucleic acid sequence encoding human TPD52L3 tumor protein D52-like 3 (NYD-SP25) (SEQ ID NO:206) and (B) the amino acid sequence of human NYD-SP25 polypeptide (SEQ ID NO:207).

[0162] FIG. 118 shows the nucleic acid sequence corresponding to misc_RNA (C3orf53), FLJ33651 (SEQ ID NO:208).

[0163] FIG. 119 shows the nucleic acid sequence corresponding to EMX2 opposite strand (non-protein coding) (EMX2OS) on chromosome 10 (SEQ ID NO:209).

[0164] FIG. 120A-B shows the (A) nucleic acid sequence encoding human wingless-type MMTV integration site family, member 16 (WNT16) (SEQ ID NO:210) and (B) the amino acid sequence of human WNT16 polypeptide (SEQ ID NO:211).

[0165] FIG. 121A-C shows the (A-B) nucleic acid sequences encoding human sprouty-related, EVH1 domain containing 2 (SPRED2) (SEQ ID NO:212, 270) and (C) the amino acid sequence of human SPRED2 (SEQ ID NO:213).

[0166] FIG. 122A-C shows the (A-B) nucleic acid sequences encoding human chromosome 16 open reading frame 65 (C16orf65) (SEQ ID NO:214, 271) and (C) the amino acid sequence of human chromosome 16 open reading frame 65 (C16orf65) (SEQ ID NO:215).

[0167] FIG. 123A-B shows the (A) nucleic acid sequence encoding human chromosome 12 open reading frame 2 (C12orf2) (SEQ ID NO:216) and (B) the amino acid sequence of human chromosome 12 open reading frame 2 (C12orf2) (SEQ ID NO:217).

[0168] FIG. 124A-B shows the (A) nucleic acid sequence encoding human multiple PDZ domain protein (MPDZ) (SEQ ID NO:218) and (B) the amino acid sequence of human MPDZ (SEQ ID NO:219).

[0169] FIG. 125A-B shows the (A) nucleic acid sequence encoding human phenylalanine-tRNA synthetase 2 (FARS2) (SEQ ID NO:220) and (B) the amino acid sequence of human FARS2 (SEQ ID NO:221).

[0170] FIG. 126A-B shows the (A) nucleic acid sequence encoding human caspase 8, apoptosis-related cysteine protease (CASP8) (SEQ ID NO:222) and (B) the amino acid sequence of human CASP8 (SEQ ID NO:223).

[0171] FIG. 127A-B shows the (A) nucleic acid sequence encoding human 5′-nucleotidase, ecto (CD73) (NT5E) (SEQ ID NO:224) and (B) the amino acid sequence of human NT5E (SEQ ID NO:225).

[0172] FIG. 128 shows the nucleic acid sequence corresponding to human teratocarcinoma-derived growth factor 3 (TDGF3) (SEQ ID NO:226).

[0173] FIG. 129A-B shows the (A) nucleic acid sequence encoding human butyrophilin-like 3 (BTNL3) (SEQ ID NO:227) and (B) the amino acid sequence of human BTNL3 (SEQ ID NO:228).

[0174] FIG. 130A-B shows the (A) nucleic acid sequence encoding human S100A8 and (B) the amino acid sequence of human S100A8.

[0175] FIG. 131A-B shows the (A) nucleic acid sequence encoding human CCL20 and (B) the amino acid sequence of human CCL20.

### DETAILED DESCRIPTION OF THE INVENTION

### A. Definitions

[0176] Unless defined otherwise, technical and scientific terms used herein have the same meaning as commonly understood by one of ordinary skill in the art to which this invention belongs. Singleton et al., Dictionary of Microbiology and Molecular Biology 2nd ed., J. Wiley & Sons (New York, N.Y. 1994), and March, Advanced Organic Chemistry Reactions, Mechanisms and Structure 4th ed., John Wiley & Sons (New York, N.Y. 1992), provide one skilled in the art with a general guide to many of the terms used in the present application.

[0177] One skilled in the art will recognize many methods and materials similar or equivalent to those described herein, which could be used in the practice of the present invention. Indeed, the present invention is in no way limited to the methods and materials described. For purposes of the present invention, the following terms are defined below.

[0178] The term “inflammatory bowel disease” or “IBD” is used as a collective term for ulcerative colitis and Crohn's disease. Although the two diseases are generally considered as two different entities, their common characteristics, such as patchy necrosis of the surface epithelium, focal accumulations of leukocytes adjacent to glandular crypts, and an increased number of intraepithelial lymphocytes (IEL) and certain macrophage subsets, justify their treatment as a single disease group.

[0179] The term “Crohn's disease” or “CD” is used herein to refer to a condition involving chronic inflammation of the gastrointestinal tract. Crohn's-related inflammation usually affects the intestines, but may occur anywhere from the mouth to the anus. CD differs from UC in that the inflammation extends through all layers of the intestinal wall and involves mesentery as well as lymph nodes. The disease is often discontinuous, i.e., severely diseased segments of bowel are separated from apparently disease-free areas. In CD, the bowel wall also thickens which can lead to obstructions, and the development of fistulas and fissures are not uncommon As used herein, CD may be one or more of several types of CD, including without limitation, ileocolitis (affects the ileum and the large intestine); ileitis (affects the ileum); gastroduodenal CD (inflammation in the stomach and the duodenum); jejunoileitis (spotty patches of inflammation in the jejunum); and Crohn's (granulomatous) colitis (only affects the large intestine).

[0180] The term “ulcerative colitis” or “UC” is used herein to refer to a condition involving inflammation of the large intestine and rectum. In patients with UC, there is an inflammatory reaction primarily involving the colonic mucosa. The inflammation is typically uniform and continuous with no intervening areas of normal mucosa. Surface mucosal cells as well as crypt epithelium and submucosa are involved in an inflammatory reaction with neutrophil infiltration. Ultimately, this reaction typically progresses to epithelial damage and loss of epithelial cells resulting in multiple ulcerations, fibrosis, dysplasia and longitudinal retraction of the colon.

[0181] The term “inactive” IBD is used herein to mean an IBD that was previously diagnosed in an individual but is currently in remission. This is in contrast to an “active” IBD in which an individual has been diagnosed with and IBD but has not undergone treatment. In addition, the active IBD may be a recurrence of a previously diagnosed and treated IBD that had gone into remission (i.e. become an inactive IBD). Such recurrences may also be referred to herein as “flare-ups” of an IBD. Mammalian subjects having an active autoimmune disease, such as an IBD, may be subject to a flare-up, which is a period of heightened disease activity or a return of corresponding symptoms. Flare-ups may occur in response to severe infection, allegic reactions, physical stress, emotional trauma, surgery, or environmental factors.

[0182] The term “modulate” is used herein to mean that the expression of the gene, or level of RNA molecule or equivalent RNA molecules encoding one or more proteins or protein subunits, or activity of one or more proteins or protein subunits is up regulated or down regulated, such that expression, level, or activity is greater than or less than that observed in the absence of the modulator.

[0183] The terms “inhibit”, “down-regulate”, “underexpress” and “reduce” are used interchangeably and mean that the expression of a gene, or level of RNA molecules or equivalent RNA molecules encoding one or more proteins or protein subunits, or activity of one or more proteins or protein subunits, is reduced relative to one or more controls, such as, for example, one or more positive and/or negative controls.

[0184] The term “up-regulate” or “overexpress” is used to mean that the expression of a gene, or level of RNA molecules or equivalent RNA molecules encoding one or more proteins or protein subunits, or activity of one or more proteins or protein subunits, is elevated relative to one or more controls, such as, for example, one or more positive and/or negative controls.

[0185] The term “diagnosis” is used herein to refer to the identification of a molecular or pathological state, disease or condition, such as the identification of IBD.

[0186] The term “prognosis” is used herein to refer to the prediction of the likelihood of IBD development or progression, including autoimmune flare-ups and recurrences following surgery. Prognostic factors are those variables related to the natural history of IBD, which influence the recurrence rates and outcome of patients once they have developed IBD. Clinical parameters that may be associated with a worse prognosis include, for example, an abdominal mass or tenderness, skin rash, swollen joints, mouth ulcers, and borborygmus (gurgling or splashing sound over the intestine). Prognostic factors may be used to categorize patients into subgroups with different baseline recurrence risks.

[0187] The “pathology” of an IBD includes all phenomena that compromise the well-being of the patient. IBD pathology is primarily attributed to abnormal activation of the immune system in the intestines that can lead to chronic or acute inflammation in the absence of any known foreign antigen, and subsequent ulceration. Clinically, IBD is characterized by diverse manifestations often resulting in a chronic, unpredictable course. Bloody diarrhea and abdominal pain are often accompanied by fever and weight loss. Anemia is not uncommon, as is severe fatigue. Joint manifestations ranging from arthralgia to acute arthritis as well as abnormalities in liver function are commonly associated with IBD. During acute “attacks” of IBD, work and other normal activity are usually impossible, and often a patient is hospitalized.

[0188] The aetiology of these diseases is unknown and the initial lesion has not been clearly defined; however, patchy necrosis of the surface epithelium, focal accumulations of leukocytes adjacent to glandular crypts, and an increased number of intraepithelial lymphocytes and certain macrophage subsets have been described as putative early changes, especially in Crohn's disease.

[0189] The term “treatment” refers to both therapeutic treatment and prophylactic or preventative measures for IBD, wherein the object is to prevent or slow down (lessen) the targeted pathologic condition or disorder. Those in need of treatment include those already with an IBD as well as those prone to have an IBD or those in whom the IBD is to be prevented. Once the diagnosis of an IBD has been made by the methods disclosed herein, the goals of therapy are to induce and maintain a remission.

[0190] Various agents that are suitable for use as an “IBD therapeutic agent” are known to those of ordinary skill in the art. As described herein, such agents include without limitation, aminosalicylates, corticosteroids, and immunosuppressive agents.

[0191] The term “test sample” refers to a sample from a mammalian subject suspected of having an IBD, known to have an IBD, or known to be in remission from an IBD. The test sample may originate from various sources in the mammalian subject including, without limitation, blood, semen, serum, urine, bone marrow, mucosa, tissue, etc.

[0192] The term “control” or “control sample” refers a negative control in which a negative result is expected to help correlate a positive result in the test sample. Controls that are suitable for the present invention include, without limitation, a sample known to have normal levels of gene expression, a sample obtained from a mammalian subject known not to have an IBD, and a sample obtained from a mammalian subject known to be normal. A control may also be a sample obtained from a subject previously diagnosed and treated for an IBD who is currently in remission; and such a control is useful in determining any recurrence of an IBD in a subject who is in remission. In addition, the control may be a sample containing normal cells that have the same origin as cells contained in the test sample. Those of skill in the art will appreciate other controls suitable for use in the present invention.

[0193] The term “microarray” refers to an ordered arrangement of hybridizable array elements, preferably polynucleotide probes, on a substrate.

[0194] The term “polynucleotide,” when used in singular or plural, generally refers to any polyribonucleotide or polydeoxyribonucleotide, which may be unmodified RNA or DNA or modified RNA or DNA. Thus, for instance, polynucleotides as defined herein include, without limitation, single- and double-stranded DNA, DNA including single- and double-stranded regions, single- and double-stranded RNA, and RNA including single- and double-stranded regions, hybrid molecules comprising DNA and RNA that may be single-stranded or, more typically, double-stranded or include single- and double-stranded regions. In addition, the term “polynucleotide” as used herein refers to triple-stranded regions comprising RNA or DNA or both RNA and DNA. The strands in such regions may be from the same molecule or from different molecules. The regions may include all of one or more of the molecules, but more typically involve only a region of some of the molecules. One of the molecules of a triple-helical region often is an oligonucleotide. The term “polynucleotide” specifically includes cDNAs. The term includes DNAs (including cDNAs) and RNAs that contain one or more modified bases. Thus, DNAs or RNAs with backbones modified for stability or for other reasons are “polynucleotides” as that term is intended herein. Moreover, DNAs or RNAs comprising unusual bases, such as inosine, or modified bases, such as tritiated bases, are included within the term “polynucleotides” as defined herein. In general, the term “polynucleotide” embraces all chemically, enzymatically and/or metabolically modified forms of unmodified polynucleotides, as well as the chemical forms of DNA and RNA characteristic of viruses and cells, including simple and complex cells.

[0195] The term “oligonucleotide” refers to a relatively short polynucleotide, including, without limitation, single-stranded deoxyribonucleotides, single- or double-stranded ribonucleotides, RNA:DNA hybrids and double-stranded DNAs. Oligonucleotides, such as single-stranded DNA probe oligonucleotides, are often synthesized by chemical methods, for example using automated oligonucleotide synthesizers that are commercially available. However, oligonucleotides can be made by a variety of other methods, including in vitro recombinant DNA-mediated techniques and by expression of DNAs in cells and organisms.

[0196] The terms “differentially expressed gene,” “differential gene expression” and their synonyms, which are used interchangeably, refer to a gene whose expression is activated to a higher or lower level in a subject suffering from a disease, specifically an IBD, such as UC or CD, relative to its expression in a normal or control subject. The terms also include genes whose expression is activated to a higher or lower level at different stages of the same disease. It is also understood that a differentially expressed gene may be either activated or inhibited at the nucleic acid level or protein level, or may be subject to alternative splicing to result in a different polypeptide product. Such differences may be evidenced by a change in mRNA levels, surface expression, secretion or other partitioning of a polypeptide, for example. Differential gene expression may include a comparison of expression between two or more genes or their gene products, or a comparison of the ratios of the expression between two or more genes or their gene products, or even a comparison of two differently processed products of the same gene, which differ between normal subjects and subjects suffering from a disease, specifically an IBD, or between various stages of the same disease. Differential expression includes both quantitative, as well as qualitative, differences in the temporal or cellular expression pattern in a gene or its expression products among, for example, normal and diseased cells, or among cells which have undergone different disease events or disease stages. For the purpose of this invention, “differential gene expression” is considered to be present when there is at least an about two-fold, preferably at least about four-fold, more preferably at least about six-fold, most preferably at least about ten-fold difference between the expression of a given gene in normal and diseased subjects, or in various stages of disease development in a diseased subject.

[0197] The term “over-expression” with regard to an RNA transcript is used to refer to the level of the transcript determined by normalization to the level of reference mRNAs, which might be all transcripts detected in the specimen or a particular reference set of mRNAs.

[0198] The phrase “gene amplification” refers to a process by which multiple copies of a gene or gene fragment are formed in a particular cell or cell line. The duplicated region (a stretch of amplified DNA) is often referred to as “amplicon”. Usually, the amount of the messenger RNA (mRNA) produced, i.e., the level of gene expression, also increases in the proportion of the number of copies made of the particular gene expressed.

[0199] In general, the term “marker” or “biomarker” or refers to an identifiable physical location on a chromosome, such as a restriction endonuclease recognition site or a gene, whose inheritance can be monitored. The marker may be an expressed region of a gene referred to as a “gene expression marker”, or some segment of DNA with no known coding function. An “IBD marker” as used herein refers those genes listed in Tables 1, 2, and 3.

[0200] “Stringency” of hybridization reactions is readily determinable by one of ordinary skill in the art, and generally is an empirical calculation dependent upon probe length, washing temperature, and salt concentration. In general, longer probes require higher temperatures for proper annealing, while shorter probes need lower temperatures. Hybridization generally depends on the ability of denatured DNA to reanneal when complementary strands are present in an environment below their melting temperature. The higher the degree of desired homology between the probe and hybridizable sequence, the higher the relative temperature which can be used. As a result, it follows that higher relative temperatures would tend to make the reaction conditions more stringent, while lower temperatures less so. For additional details and explanation of stringency of hybridization reactions, see Ausubel et al., Current Protocols in Molecular Biology, Wiley Interscience Publishers, (1995).

[0201] “Stringent conditions” or “high stringency conditions”, as defined herein, typically: (1) employ low ionic strength and high temperature for washing, for example 0.015 M sodium chloride/0.0015 M sodium citrate/0.1% sodium dodecyl sulfate at 50° C.; (2) employ during hybridization a denaturing agent, such as formamide, for example, 50% (v/v) formamide with 0.1% bovine serum albumin/0.1% Ficoll/0.1% polyvinylpyrrolidone/50 mM sodium phosphate buffer at pH 6.5 with 750 mM sodium chloride, 75 mM sodium citrate at 42° C.; or (3) employ 50% formamide, 5×SSC (0.75 M NaCl, 0.075 M sodium citrate), 50 mM sodium phosphate (pH 6.8), 0.1% sodium pyrophosphate, 5×Denhardt's solution, sonicated salmon sperm DNA (50 μg/ml), 0.1% SDS, and 10% dextran sulfate at 42° C., with washes at 42° C. in 0.2×SSC (sodium chloride/sodium citrate), 50% formamide, followed by a high-stringency wash consisting of 0.1×SSC containing EDTA at 55° C.

[0202] “Moderately stringent conditions” may be identified as described by Sambrook et al., Molecular Cloning: A Laboratory Manual, New York: Cold Spring Harbor Press, 1989, and include the use of washing solution and hybridization conditions (e.g., temperature, ionic strength and % SDS) less stringent that those described above. An example of moderately stringent conditions is overnight incubation at 37° C. in a solution comprising: 20% formamide, 5×SSC (150 mM NaCl, 15 mM trisodium citrate), 50 mM sodium phosphate (pH 7.6), 5×Denhardt's solution, 10% dextran sulfate, and 20 mg/ml denatured sheared salmon sperm DNA, followed by washing the filters in 1×SSC at about 37-50° C. The skilled artisan will recognize how to adjust the temperature, ionic strength, etc. as necessary to accommodate factors such as probe length and the like.

[0203] In the context of the present invention, reference to “at least one,” “at least two,” “at least five,” etc. of the genes listed in any particular gene set means any one or any and all combinations of the genes listed.

[0204] The terms “splicing” and “RNA splicing” are used interchangeably and refer to RNA processing that removes introns and joins exons to produce mature mRNA with continuous coding sequence that moves into the cytoplasm of an eukaryotic cell.

[0205] In theory, the term “exon” refers to any segment of an interrupted gene that is represented in the mature RNA product (B. Lewin. Genes IV Cell Press, Cambridge Mass. 1990). In theory the term “intron” refers to any segment of DNA that is transcribed but removed from within the transcript by splicing together the exons on either side of it. Operationally, exon sequences occur in the mRNA sequence of a gene as defined by Ref. SEQ ID numbers. Operationally, intron sequences are the intervening sequences within the genomic DNA of a gene, bracketed by exon sequences and having GT and AG splice consensus sequences at their 5′ and 3′ boundaries.

[0206] An “interfering RNA” or “small interfering RNA (siRNA)” is a double stranded RNA molecule usually less than about 30 nucleotides in length that reduces expression of a target gene. Interfering RNAs may be identified and synthesized using known methods (Shi Y., Trends in Genetics 19(1):9-12 (2003), WO/2003056012 and WO2003064621), and siRNA libraries are commercially available, for example from Dharmacon, Lafayette, Colo.

[0207] A “native sequence” polypeptide is one which has the same amino acid sequence as a polypeptide derived from nature, including naturally occurring or allelic variants. Such native sequence polypeptides can be isolated from nature or can be produced by recombinant or synthetic means. Thus, a native sequence polypeptide can have the amino acid sequence of naturally occurring human polypeptide, murine polypeptide, or polypeptide from any other mammalian species.

[0208] The term “antibody” herein is used in the broadest sense and specifically covers monoclonal antibodies, polyclonal antibodies, multispecific antibodies (e.g. bispecific antibodies), and antibody fragments, so long as they exhibit the desired biological activity. The present invention particularly contemplates antibodies against one or more of the IBD markers disclosed herein. Such antibodies may be referred to as “anti-IBD marker antibodies”.

[0209] The term “monoclonal antibody” as used herein refers to an antibody from a population of substantially homogeneous antibodies, i.e., the individual antibodies comprising the population are identical and/or bind the same epitope(s), except for possible variants that may arise during production of the monoclonal antibody, such variants generally being present in minor amounts. Such monoclonal antibody typically includes an antibody comprising a polypeptide sequence that binds a target, wherein the target-binding polypeptide sequence was obtained by a process that includes the selection of a single target binding polypeptide sequence from a plurality of polypeptide sequences.

[0210] The monoclonal antibodies herein specifically include “chimeric” antibodies in which a portion of the heavy and/or light chain is identical with or homologous to corresponding sequences in antibodies derived from a particular species or belonging to a particular antibody class or subclass, while the remainder of the chain(s) is identical with or homologous to corresponding sequences in antibodies derived from another species or belonging to another antibody class or subclass, as well as fragments of such antibodies, so long as they exhibit the desired biological activity (U.S. Pat. No. 4,816,567; and Morrison et al., Proc. Natl. Acad. Sci. USA, 81:6851-6855 (1984)). Chimeric antibodies of interest herein include “primatized” antibodies comprising variable domain antigen-binding sequences derived from a non-human primate (e.g. Old World Monkey, Ape etc) and human constant region sequences, as well as “humanized” antibodies.

[0211] “Humanized” forms of non-human (e.g., rodent) antibodies are chimeric antibodies that contain minimal sequence derived from non-human immunoglobulin. For the most part, humanized antibodies are human immunoglobulins (recipient antibody) in which residues from a hypervariable region of the recipient are replaced by residues from a hypervariable region of a non-human species (donor antibody) such as mouse, rat, rabbit or nonhuman primate having the desired specificity, affinity, and capacity.

[0212] An “intact antibody” herein is one which comprises two antigen binding regions, and an Fc region. Preferably, the intact antibody has a functional Fc region.

[0213] “Antibody fragments” comprise a portion of an intact antibody, preferably comprising the antigen binding region thereof. Examples of antibody fragments include Fab, Fab′, F(ab′)₂, and Fv fragments; diabodies; linear antibodies; single-chain antibody molecules; and multispecific antibodies formed from antibody fragment(s).

[0214] “Native antibodies” are usually heterotetrameric glycoproteins of about 150,000 daltons, composed of two identical light (L) chains and two identical heavy (H) chains. Each light chain is linked to a heavy chain by one covalent disulfide bond, while the number of disulfide linkages varies among the heavy chains of different immunoglobulin isotypes. Each heavy and light chain also has regularly spaced intrachain disulfide bridges. Each heavy chain has at one end a variable domain (V_{H}) followed by a number of constant domains. Each light chain has a variable domain at one end (V_{L}) and a constant domain at its other end. The constant domain of the light chain is aligned with the first constant domain of the heavy chain, and the light-chain variable domain is aligned with the variable domain of the heavy chain. Particular amino acid residues are believed to form an interface between the light chain and heavy chain variable domains.

[0215] The term “variable” refers to the fact that certain portions of the variable domains differ extensively in sequence among antibodies and are used in the binding and specificity of each particular antibody for its particular antigen. However, the variability is not evenly distributed throughout the variable domains of antibodies. It is concentrated in three segments called hypervariable regions both in the light chain and the heavy chain variable domains. The more highly conserved portions of variable domains are called the framework regions (FRs). The variable domains of native heavy and light chains each comprise four FRs, largely adopting a β-sheet configuration, connected by three hypervariable regions, which form loops connecting, and in some cases forming part of, the β-sheet structure. The hypervariable regions in each chain are held together in close proximity by the FRs and, with the hypervariable regions from the other chain, contribute to the formation of the antigen-binding site of antibodies (see Kabat et al., Sequences of Proteins of Immunological Interest, 5th Ed. Public Health Service, National Institutes of Health, Bethesda, Md. (1991)).

[0216] The term “hypervariable region,” “HVR,” or “HV,” when used herein refers to the regions of an antibody-variable domain that are hypervariable in sequence and/or form structurally defined loops. Generally, antibodies comprise six HVRs; three in the VH(H1, H2, H3), and three in the VL (L1, L2, L3). In native antibodies, H3 and L3 display the most diversity of the six HVRs, and H3 in particular is believed to play a unique role in conferring fine specificity to antibodies. See, e.g., Xu et al. Immunity 13:37-45 (2000); Johnson and Wu in Methods in Molecular Biology 248:1-25 (Lo, ed., Human Press, Totowa, N.J., 2003)). Indeed, naturally occurring camelid antibodies consisting of a heavy chain only are functional and stable in the absence of light chain. See, e.g., Hamers-Casterman et al., Nature 363:446-448 (1993) and Sheriff et al., Nature Struct. Biol. 3:733-736 (1996).

[0217] A number of hypervariable region delineations are in use and are encompassed herein. The Kabat Complementarity Determining Regions (CDRs) are based on sequence variability and are the most commonly used (Kabat et al., Sequences of Proteins of Immunological Interest, 5th Ed. Public Health Service, National Institutes of Health, Bethesda, Md. (1991)). Chothia refers instead to the location of the structural loops (Chothia and Lesk J. Mol. Biol. 196:901-917 (1987)). The end of the Chothia CDR-H1 loop when numbered using the Kabat numbering convention varies between H32 and H34 (see below) depending on the length of the loop (this is because the Kabat numbering scheme places the insertions at H35A and H35B; if neither 35A nor 35B is present, the loop ends at 32; if only 35A is present, the loop ends at 33; if both 35A and 35B are present, the loop ends at 34). The AbM hypervariable regions represent a compromise between the Kabat CDRs and Chothia structural loops, and are used by Oxford Molecular's AbM antibody modeling software. The “contact” hypervariable regions are based on an analysis of the available complex crystal structures. The residues from each of these hypervariable regions are noted below.

| Loop | Kabat | AbM | Chothia | Contact |
|---|---|---|---|---|
| L1 | L24-L34 | L24-L34 | L24-L34 | L30-L36 |
| L2 | L50-L56 | L50-L56 | L50-L56 | L46-L55 |
| L3 | L89-L97 | L89-L97 | L89-L97 | L89-L96 |
| H1 | H31-H35B | H26-H35B | H26-H32, | H30-H35B |
| | | | 33 or 34 | |

(Kabat Numbering)

| | | | | |
|---|---|---|---|---|
| H1 | H31-H35 | H26-H35 | H26-H32 | H30-H35 |

(Chothia Numbering)

| | | | | |
|---|---|---|---|---|
| H2 | H50-H65 | H50-H58 | H52-H56 | H47-H58 |
| H3 | H95-H102 | H95-H102 | H95-H102 | H93-H101. |

[0218] Hypervariable regions may comprise “extended hypervariable regions” as follows: 24-36 or 24-34 (L1), 46-56 or 50-56 (L2) and 89-97 (L3) in the VL and 26-35B (H1), 50-65, 47-65 or 49-65 (H2) and 93-102, 94-102 or 95-102 (H3) in the VH. These extended hypervariable regions are typically combinations of the Kabat and Chothia definitions, which may optionally further include residues identified using the Contact definition. The variable domain residues are numbered according to Kabat et al., supra for each of these definitions.

[0219] Papain digestion of antibodies produces two identical antigen-binding fragments, called “Fab” fragments, each with a single antigen-binding site, and a residual “Fc” fragment, whose name reflects its ability to crystallize readily. Pepsin treatment yields an F(ab′)₂ fragment that has two antigen-binding sites and is still capable of cross-linking antigen.

[0220] “Fv” is the minimum antibody fragment which contains a complete antigen-recognition and antigen-binding site. This region consists of a dimer of one heavy chain and one light chain variable domain in tight, non-covalent association. It is in this configuration that the three hypervariable regions of each variable domain interact to define an antigen-binding site on the surface of the V_{H}-V_{L} dimer. Collectively, the six hypervariable regions confer antigen-binding specificity to the antibody. However, even a single variable domain (or half of an Fv comprising only three hypervariable regions specific for an antigen) has the ability to recognize and bind antigen, although at a lower affinity than the entire binding site.

[0221] The Fab fragment also contains the constant domain of the light chain and the first constant domain (CH1) of the heavy chain. Fab′ fragments differ from Fab fragments by the addition of a few residues at the carboxy terminus of the heavy chain CH1 domain including one or more cysteines from the antibody hinge region. Fab′-SH is the designation herein for Fab′ in which the cysteine residue(s) of the constant domains bear at least one free thiol group. F(ab′)₂ antibody fragments originally were produced as pairs of Fab′ fragments which have hinge cysteines between them. Other chemical couplings of antibody fragments are also known.

[0222] The “light chains” of antibodies from any vertebrate species can be assigned to one of two clearly distinct types, called kappa (x) and lambda (λ), based on the amino acid sequences of their constant domains.

[0223] The term “Fc region” herein is used to define a C-terminal region of an immunoglobulin heavy chain, including native sequence Fc regions and variant Fc regions. Although the boundaries of the Fc region of an immunoglobulin heavy chain might vary, the human IgG heavy chain Fc region is usually defined to stretch from an amino acid residue at position Cys226, or from Pro230, to the carboxyl-terminus thereof. The C-terminal lysine (residue 447 according to the EU numbering system) of the Fc region may be removed, for example, during production or purification of the antibody, or by recombinantly engineering the nucleic acid encoding a heavy chain of the antibody. Accordingly, a composition of intact antibodies may comprise antibody populations with all K447 residues removed, antibody populations with no K447 residues removed, and antibody populations having a mixture of antibodies with and without the K447 residue.

[0224] Unless indicated otherwise, herein the numbering of the residues in an immunoglobulin heavy chain is that of the EU index as in Kabat et al., Sequences of Proteins of Immunological Interest, 5th Ed. Public Health Service, National Institutes of Health, Bethesda, Md. (1991), expressly incorporated herein by reference. The “EU index as in Kabat” refers to the residue numbering of the human IgG1 EU antibody.

[0225] A “native sequence Fc region” comprises an amino acid sequence identical to the amino acid sequence of an Fc region found in nature. Native sequence human Fc regions include a native sequence human IgG1 Fc region (non-A and A allotypes); native sequence human IgG2 Fc region; native sequence human IgG3 Fc region; and native sequence human IgG4 Fc region as well as naturally occurring variants thereof.

[0226] A “variant Fc region” comprises an amino acid sequence which differs from that of a native sequence Fc region by virtue of at least one amino acid modification, preferably one or more amino acid substitution(s). Preferably, the variant Fc region has at least one amino acid substitution compared to a native sequence Fc region or to the Fc region of a parent polypeptide, e.g. from about one to about ten amino acid substitutions, and preferably from about one to about five amino acid substitutions in a native sequence Fc region or in the Fc region of the parent polypeptide. The variant Fc region herein will preferably possess at least about 80% homology with a native sequence Fc region and/or with an Fc region of a parent polypeptide, and most preferably at least about 90% homology therewith, more preferably at least about 95% homology therewith.

[0227] Depending on the amino acid sequence of the constant domain of their heavy chains, intact antibodies can be assigned to different “classes”. There are five major classes of intact antibodies: IgA, IgD, IgE, IgG, and IgM, and several of these may be further divided into “subclasses” (isotypes), e.g., IgG1, IgG2, IgG3, IgG4, IgA, and IgA2. The heavy-chain constant domains that correspond to the different classes of antibodies are called α, δ, ε, γ, and μ, respectively. The subunit structures and three-dimensional configurations of different classes of immunoglobulins are well known.

[0228] “Single-chain Fv” or “scFv” antibody fragments comprise the V_{H} and V_{L} domains of antibody, wherein these domains are present in a single polypeptide chain. Preferably, the Fv polypeptide further comprises a polypeptide linker between the V_{H} and V_{L} domains which enables the scFv to form the desired structure for antigen binding. For a review of scFv see Plückthun in The Pharmacology of Monoclonal Antibodies, vol. 113, Rosenburg and Moore eds., Springer-Verlag, New York, pp. 269-315 (1994).

[0229] The term “diabodies” refers to small antibody fragments with two antigen-binding sites, which fragments comprise a variable heavy domain (V_{H}) connected to a variable light domain (V_{L}) in the same polypeptide chain (V_{H}-V_{L}). By using a linker that is too short to allow pairing between the two domains on the same chain, the domains are forced to pair with the complementary domains of another chain and create two antigen-binding sites. Diabodies are described more fully in, for example, EP 404,097; WO 93/11161; and Hollinger et al., Proc. Natl. Acad. Sci. USA, 90:6444-6448 (1993).

[0230] A “naked antibody” is an antibody that is not conjugated to a heterologous molecule, such as a small molecule or radiolabel.

[0231] An “isolated” antibody is one which has been identified and separated and/or recovered from a component of its natural environment. Contaminant components of its natural environment are materials which would interfere with diagnostic or therapeutic uses for the antibody, and may include enzymes, hormones, and other proteinaceous or nonproteinaceous solutes. In preferred embodiments, the antibody will be purified (1) to greater than 95% by weight of antibody as determined by the Lowry method, and most preferably more than 99% by weight, (2) to a degree sufficient to obtain at least 15 residues of N-terminal or internal amino acid sequence by use of a spinning cup sequenator, or (3) to homogeneity by SDS-PAGE under reducing or nonreducing conditions using Coomassie blue or, preferably, silver stain. Isolated antibody includes the antibody in situ within recombinant cells since at least one component of the antibody's natural environment will not be present. Ordinarily, however, isolated antibody will be prepared by at least one purification step.

[0232] An “affinity matured” antibody is one with one or more alterations in one or more hypervariable regions thereof which result an improvement in the affinity of the antibody for antigen, compared to a parent antibody which does not possess those alteration(s). Preferred affinity matured antibodies will have nanomolar or even picomolar affinities for the target antigen. Affinity matured antibodies are produced by procedures known in the art. Marks et al. Bio/Technology 10:779-783 (1992) describes affinity maturation by VH and VL domain shuffling. Random mutagenesis of HVR and/or framework residues is described by: Barbas et al. Proc Nat. Acad. Sci, USA 91:3809-3813 (1994); Schier et al. Gene 169:147-155 (1995); Yelton et al. J. Immunol. 155:1994-2004 (1995); Jackson et al., J. Immunol. 154(7):3310-9 (1995); and Hawkins et al, J. Mol. Biol. 226:889-896 (1992).

[0233] An “amino acid sequence variant” antibody herein is an antibody with an amino acid sequence which differs from a main species antibody. Ordinarily, amino acid sequence variants will possess at least about 70% homology with the main species antibody, and preferably, they will be at least about 80%, more preferably at least about 90% homologous with the main species antibody. The amino acid sequence variants possess substitutions, deletions, and/or additions at certain positions within or adjacent to the amino acid sequence of the main species antibody. Examples of amino acid sequence variants herein include an acidic variant (e.g. deamidated antibody variant), a basic variant, an antibody with an amino-terminal leader extension (e.g. VHS-) on one or two light chains thereof, an antibody with a C-terminal lysine residue on one or two heavy chains thereof, etc., and includes combinations of variations to the amino acid sequences of heavy and/or light chains. The antibody variant of particular interest herein is the antibody comprising an amino-terminal leader extension on one or two light chains thereof, optionally further comprising other amino acid sequence and/or glycosylation differences relative to the main species antibody.

[0234] A “glycosylation variant” antibody herein is an antibody with one or more carbohydrate moieties attached thereto which differ from one or more carbohydrate moieties attached to a main species antibody. Examples of glycosylation variants herein include antibody with a G1 or G2 oligosaccharide structure, instead a G0 oligosaccharide structure, attached to an Fc region thereof, antibody with one or two carbohydrate moieties attached to one or two light chains thereof, antibody with no carbohydrate attached to one or two heavy chains of the antibody, etc., and combinations of glycosylation alterations.

[0235] Where the antibody has an Fc region, an oligosaccharide structure may be attached to one or two heavy chains of the antibody, e.g. at residue 299 (298, Eu numbering of residues). For pertuzumab, G0 was the predominant oligosaccharide structure, with other oligosaccharide structures such as G0-F, G-1, ManS, Man6, G1-1, G1(1-6), G1(1-3) and G2 being found in lesser amounts in the pertuzumab composition.

[0236] Unless indicated otherwise, a “G1 oligosaccharide structure” herein includes G-1, G1-1, G1(1-6) and G1(1-3) structures.

[0237] An “amino-terminal leader extension” herein refers to one or more amino acid residues of the amino-terminal leader sequence that are present at the amino-terminus of any one or more heavy or light chains of an antibody. An exemplary amino-terminal leader extension comprises or consists of three amino acid residues, VHS, present on one or both light chains of an antibody variant.

[0238] A “deamidated” antibody is one in which one or more asparagine residues thereof has been derivatized, e.g. to an aspartic acid, a succinimide, or an iso-aspartic acid.

### B.1 GENERAL DESCRIPTION OF THE INVENTION

[0239] The practice of the present invention will employ, unless otherwise indicated, conventional techniques of molecular biology (including recombinant techniques), microbiology, cell biology, and biochemistry, which are within the skill of the art. Such techniques are explained fully in the literature, such as, “Molecular Cloning: A Laboratory Manual”, 2^{nd} edition (Sambrook et al., 1989); “Oligonucleotide Synthesis” (M. J. Gait, ed., 1984); “Animal Cell Culture” (R. I. Freshney, ed., 1987); “Methods in Enzymology” (Academic Press, Inc.); “Handbook of Experimental Immunology”, 4^{th} edition (D. M. Weir & C. C. Blackwell, eds., Blackwell Science Inc., 1987); “Gene Transfer Vectors for Mammalian Cells” (J. M. Miller & M. P. Calos, eds., 1987); “Current Protocols in Molecular Biology” (F. M. Ausubel et al., eds., 1987); and “PCR: The Polymerase Chain Reaction”, (Mullis et al., eds., 1994).

[0240] As discussed above, the detection or diagnosis of IBD is currently obtained by various classification systems that rely on a number of variables observed in a patient. The present invention is based on the identification of genes that are associated with IBD. Accordingly, the expression levels of such genes can serve as diagnostic markers to identify patients with IBD. As described in the Examples, the differential expression of a number of genes in IBD patients has been observed. Thus, according to the present invention, the genes listed in Tables 1A-B, 2, and 3A-B have been identified as differentially expressed in IBD.

[0241] Table 1A provides a list of genes that are upregulated in IBD.

TABLE 1A

| | | SEQ | |
|---|---|---|---|
| | | ID NO | |
| | | nucleic | |
| | | acid, | |
| | Indi- | amino | Fig- |
| Gene | cation(s) | acid | ure |
| Defensin, alpha 6 (DEFA6) | CD, UC | 1, 2 | 8 |
| Defensin, alpha 5 (DEFA5) | UC | 3, 4 | 9A-B |
| Defensin beta 14 (DEFB14) | UC | 229, 230 | 9C-D |
| IL-3 receptor, alpha low affinity | CD | 5, 6 | 10 |
| (IL3RA) | | | |
| IL-2 receptor, alpha (IL2RA) | CD, UC | 7, 8 | 11 |
| Regenerating islet-derived 3 | CD, UC | 9, 10 | 12 |
| gamma (REG3G) | | | |
| Regenerating islet-derived 1 beta | CD, UC | 11, 12 | 13 |
| pancreatic stone protein (REG1B) | | | |
| Potassium voltage-gated channel, | CD, UC | 13, 14 | 14 |
| Shal-related subfamily (KCND3) | | | |
| Human macrophage inflammatory | CD, UC | 15, 16 | 15 |
| protein 3 (MIP-3a) | | | |
| Endothelial cell growth factor 1 | CD, UC | 17, 18 | 16 |
| platelet-derived (ECGF1) | | | |
| Interleukin 1 beta (IL1B) | CD, UC | 19, 20 | 17 |
| Growth regulated protein gamma | CD, UC | 21, 22 | 18 |
| (MIP2BGRO-g) | | | |
| Chemokine C-X-C motif ligand 1 | CD, UC | 23, 24 | 19 |
| (CXCL1) | | | |
| Inhibitor of apoptosis protein 1 | CD, UC | 25, 26 | 20 |
| (IAP1) | | | |
| Caspase 5, apoptosis-related cyste- | CD, UC | 27, 28 | 21 |
| ine protease (CASP5) | | | |
| Deleted in malignant brain tumors | CD, UC | 29, 30 | 22 |
| 1 (DMBT1) | | | |
| Protocadherin 17 (PCDH17) | CD, UC | 31, 32 | 23 |
| Interferon-inducible protein 9-27 | CD, UC | 33, 34 | 24 |
| (IFITM1) | | | |
| PDZK1 interacting protein 1 | CD, UC | 35, 36 | 25 |
| (PDZK1IP1) | | | |
| IRTA2/FCRH5 (IRTA2) | CD | 37, 38 | 26 |
| Solute carrier family 40 iron- | CD, UC | 39, 40 | 27 |
| regulated transporter, member 1 | | | |
| (SLC40A1) | | | |
| Immunoglobulin heavy variable | CD, UC | 41, 42 | 28 |
| 4-4 (IGHV4-4) | | | |
| Regenerating islet-derived 3 | CD, UC | 43, 44 | 29 |
| gamma (REG3G) | | | |
| Aquaporin 9 (AQP9) | CD, UC | 45, 46 | 30 |
| Olfactomedin 4 (OLFM4) | CD, UC | 47, 48 | 31 |
| S100 calcium binding protein A9 | CD, UC | 49, 50 | 32 |
| calgranulin B (S100A9) | | | |
| unc-5 homolog C C. elegans-like | CD, UC | 51, 52 | 33 |
| (UNC5CL) | | | |
| G protein-coupled receptor 110 | CD, UC | 53, 54 | 34 |
| (GPR110) | | | |
| HLA-G histocompatibility antigen, | CD, UC | 55, 56 | 35 |
| class I, G (HLA-G) | | | |
| Transporter 1, ATP-binding cas- | CD, UC | 57, 58 | 36 |
| sette, sub-family B MDR/TAP | | | |
| (TAP1) | | | |
| Mitogen-activated protein kinase | CD, UC | 59, 60 | 37 |
| kinase kinase 8 (MAP3K8) | | | |
| Ubiquitin D\| | CD, UC | 61, 62 | 38 |
| Gamma-aminobutyric acid GABA | | | |
| B receptor, 1 (UBD\|GABBR1) | | | |
| DEAH Asp-Glu-Ala-Asp/His | CD, UC | 63, 64 | 39 |
| box polypeptide 57 (DHX57) | | | |
| Metastasis-associate (MA) | CD, UC | 65, 66 | 40 |
| LY6/PLAUR domain containing 5 | | | |
| (LYPD5) | | | |
| Immunoglobulin lambda joining- | CD, UC | 67, 68 | 41 |
| constant/OR18 (IGLJCOR18) | | | |
| TNF R superfamily, member 6b, | CD, UC | 69, 70 | 42 |
| decoy (TNFRSF6B) | | | |
| serum amyloid A1 (SAA1) | CD, UC | 71, 72 | 43 |
| Transporter 2, ATP-binding cas- | CD, UC | 73, 74 | 44 |
| sette, sub-family B MDR/TAP | | | |
| (TAP2) | | | |
| PCAA17448 | CD, UC | 75, 76 | 45 |
| lipocalin 2 oncogene 24p3 (LCN2) | CD, UC | 77, 78 | 46 |
| Z-D binding protein 1 (ZBP1) | CD, UC | 79, 80 | 47 |
| TNFAIP3 interacting protein 3 | CD, UC | 81, 82 | 48 |
| (TNIP3) | | | |
| Zinc finger CCCH-type containing | CD, UC | 83, 84 | 49 |
| 12A (ZC3H12A) | | | |
| Chitinase 3-like 1 cartilage glyco- | CD, UC | 85, 86 | 50 |
| protein-39 (CHI3L1) | | | |
| Fc fragment of IgG, low affinity | CD, UC | 87, 88 | 51 |
| IIIa, receptor CD16a (FCGR3A) | | | |
| Sterile alpha motif domain contain- | CD, UC | 89, 90 | 52 |
| ing 9-like (SAMD9L) | | | |
| Matrix metalloproteinase 9 | CD | 91, 92 | 53 |
| gelatinase B, 92 kDa gelatinase, | | | |
| 92 kDa type IV collagenase | | | |
| (MMP9) | | | |
| Matrix metalloproteinase 7 | CD, UC | 93, 94 | 54 |
| matrilysin, uterine (MMP7) | | | |
| B-factor, properdin (BF) | CD, UC | 95, 96 | 55 |
| S100 calcium binding protein P | CD, UC | 97, 98 | 56 |
| (S100P) | | | |
| Growth regulated protein (GRO) | CD, UC | 99, 100 | 57 |
| Indoleamine-pyrrole 2,3 | CD, UC | 101, 102 | 58 |
| dioxygenase INDO (INDO) | | | |
| Tripartite motif-containing 22 | CD, UC | 103, 104 | 59 |
| (TRIM22) | | | |
| Serum amyloid A2 (SAA2) | CD, UC | 105, 106 | 60 |
| Arrestin domain containing 5 | CD, UC | 193, 194 | 110 |
| (ARRDC5) (LOC342959) | | | |
| ataxin 3-like (ATXN3L) | CD, UC | 195 | 111 |
| (A_24_P910246) | | | |
| follicle stimulating hormone recep- | CD, UC | 196, 197 | 112 |
| tor (FSHR) (LOC92552) | | | |
| platelet-derived growth factor re- | CD, UC | 198, 199 | 113 |
| ceptor, alpha polypeptide | | | |
| (PDGFRA) | | | |
| transforming growth factor beta 3 | CD, UC | 200, 201 | 114 |
| (TGFB3) | | | |
| potassium channel tetramerisation | CD, UC | 202, 203 | 115 |
| domain containing 8 (KCTD8) | | | |
| transglutaminase 4 (TGM4) | CD, UC | 204, 205 | 116 |
| TPD52L3 tumor protein D52-like 3 | CD, UC | 206, 207 | 117 |
| (NYD-SP25) | | | |
| misc_RNA (C3orf53) (FLJ33651) | CD, UC | 208 | 118 |
| EMX2 opposite strand (non-protein | CD, UC | 209 | 119A |
| coding) (EMX2OS) on chromo- | | | |
| some 10 | | | |
| S100A8 | UC | 231, 232 | 130 |
| CCL20 | UC | 233, 234 | 131 |

[0242] Table 1B provides a list of genes that are downregulated in IBD.

| | | SEQ | |
|---|---|---|---|
| | | ID NO | |
| | | nucleic | |
| | | acid, | |
| | Indi- | amino | Fig- |
| Gene | cation(s) | acid | ure |
| Sialidase 4 (NEU4) | CD, UC | 107, 108 | 61 |
| wingless-type MMTV integration site | CD, UC | 210, 211 | 120 |
| family, member 16 (WNT16) | | | |
| sprouty-related, EVH1 domain con- | CD, UC | 212, 213 | 121 |
| taining 2 (SPRED2) | | | |
| chromosome 16 open reading frame 65 | CD, UC | 214, 215 | 122 |
| (C16orf65) (MGC50721) | | | |
| chromosome 12 open reading frame 2 | CD, UC | 216, 217 | 123 |
| (C12orf2) | | | |
| multiple PDZ domain protein (MPDZ) | CD, UC | 218, 219 | 124 |
| phenylalanine-tRNA synthetase 2 | CD, UC | 220, 221 | 125 |
| (FARS2) | | | |
| caspase 8, apoptosis-related cysteine | CD, UC | 222, 223 | 126 |
| protease (CASP8) | | | |
| 5′-nucleotidase, ecto (CD73) (NT5E) | CD, UC | 224, 225 | 127 |
| teratocarcinoma-derived growth factor | CD, UC | 226 | 128 |
| 3 (TDGF3) | | | |
| butyrophilin-like 3 (BTNL3) | CD, UC | 227, 228 | 129 |

[0243] Table 2 provides a list of genes that are upregulated in IBD. These genes were identified from the immune response in silico (IRIS) collection of genes (Abbas, A. et al. Genes and Immunity, 6:319-331 (2005) hereby incorporated by reference in its entirety).

TABLE 2

| | | SEQ | |
|---|---|---|---|
| | | ID NO | |
| | | nucleic | |
| | | acid, | |
| | Indi- | amino | Fig- |
| Gene | cation(s) | acid | ure |
| Immunoglobulin domain IRTA2/ | CD, UC | 109, 110 | 62 |
| FCRH5 | | | |
| Immunoglobulin lambda joining-con- | CD, UC | 111, 112 | 63 |
| stant/OR18 (IGLJCOR18) | | | |
| Immunoglobulin heavy variable 4-4 | CD, UC | 113, 114 | 64 |
| (IGHV4-4) | | | |
| Matrix metalloproteinase 9 gelatinase B, | CD, UC | 115, 116 | 65 |
| 92 kDa gelatinase, 92 kDa type IV | | | |
| collagenase (MMP9) | | | |
| Growth regulated protein (GRO) | CD, UC | 117, 118 | 66 |
| Growth regulated protein gamma | CD, UC | 119, 120 | 67 |
| (MIP2BGRO-g) | | | |
| interleukin 1, beta (IL1B) | CD, UC | 121, 122 | 68 |
| IL-3 receptor, alpha low affinity | CD, UC | 123, 124 | 69 |
| (IL3RA) | | | |
| Caspase 1, apoptosis-related cysteine | CD, UC | 125, 126 | 70 |
| protease interleukin 1, beta, convertase | | | |
| (CASP1) | | | |
| Bv8 protein (BV8) | CD, UC | 127, 128 | 71 |

[0244] Table 3A provides a list of genes that are upregulated in IBD and were identified based on the experiments described in Example 2. In some instances, the locus/chromosome of the gene is provided.

TABLE 3A

| | | Locus/ | SEQ ID NO | |
|---|---|---|---|---|
| | Indi- | Chromosome | nucleic acid, | |
| Gene | cation(s) | (if known) | amino acid | Figure |
| HDAC7A | UC | IBD2/12 | 129, 130 | 72 |
| ACVRL1 | UC | IBD2/12 | 131, 132 | 73 |
| NR4A1 | UC | IBD2/12 | 133, 134 | 74 |
| K5B | UC | IBD2/12 | 135, 136 | 75 |
| SILV | UC | IBD2/12 | 137, 138 | 76 |
| IRAK3 | UC | IBD2/12 | 139, 140 | 77 |
| IL-4 | UC | IBD5/5 | 141, 142 | 78 |
| IL-13 | UC | IBD5/5 | 143, 144 | 79 |
| RAD50 | UC | IBD5/5 | 145, 146 | 80 |
| IL-5 | UC | IBD5/5 | 147, 148 | 81 |
| IRF1 | UC | IBD5/5 | 149, 150 | 82 |
| PDLIM4 | UC | IBD5/5 | 151, 152 | 83 |
| CSF2 | UC | IBD5/5 | 153, 154 | 84 |
| IL-3 | UC | IBD5/5 | 155, 156 | 85 |
| MMP3 | UC | | 157, 158 | 86 |
| IL-8 | UC | | 159, 160 | 87 |
| TLR4 | UC | | 161, 162 | 88 |
| HLA-DRB1 | UC | | 163, 164 | 89 |
| MMP19 | UC | | 165, 166 | 90 |
| TIMP1 | UC | | 167, 168 | 91 |
| Elfin | UC | | 169, 170 | 92 |
| CXCL1 | UC | | 171, 172 | 93 |

[0245] Table 3B provides a list of genes that are down-regulated in IBD and were identified based on the experiments described in Example 2. In some instances, the locus/chromosome of the gene is provided.

TABLE 3B

| | | | SEQ ID NO | |
|---|---|---|---|---|
| | Indi- | Locus/ | nucleic acid, | |
| Gene | cation(s) | Chromosome | amino acid | Figure |
| DFKZP586A0522 | UC | IBD2/12 | 173, 174 | 94 |
| SLC39A5 | UC | IBD2/12 | 175, 176 | 95 |
| GLI-1 | UC | IBD2/12 | 177, 178 | 96 |
| HMGA2 | UC | IBD2/12 | 179, 180 | 97 |
| SLC22A5 | UC | IBD5/5 | 181, 182 | 98 |
| SLC22A4 | UC | IBD5/5 | 183, 184 | 99 |
| P4HA2 | UC | IBD5/5 | 185, 186 | 100 |
| TSLP | UC | | 187, 188 | 101 |
| tubulin alpha 5/alpha 3 | UC | | 189, 190 | 102 |
| tubulin alpha 6 | UC | | 191, 192 | 103 |

[0246] a. Biomarkers of the Invention

[0247] The present invention provides numerous gene expression markers or biomarkers for IBD listed in Tables 1A, 1B, 2, 3A, and 3B. In one embodiment of the present invention, the biomarkers are suitable for use in a panel of markers (as described herein). Such panels may include one or more markers from Table 1A; one or more markers from Table 1B; the marker from Table 2; one or markers from Table 3A; and one or more markers from Table 3B. In addition, the present invention also contemplates panels of markers selected from two or more of Tables 1A, 1B, 2, 3A, and 3B. For example, a panel might contain one or more markers from Table 1A and one or more markers from Table 1B; or one or more markers from Table 1A and the marker from Table 2; or one or more markers from Table 1B and the marker from Table 2; or one or more markers from Table 1A and one or more markers from Table 3A, etc. Those of ordinary skill in the art will appreciate the various combinations of biomarkers from Tables 1-3 that are suitable for use in the panels described herein.

[0248] In one embodiment of the present invention, a preferred set of IBD markers identified by microarray analysis, includes markers that are upregulated in an IBD. Preferably, the set of upregulated markers includes DEFA5 (SEQ ID NOS:3-4), DEFA6 (SEQ ID NO:1-2), TNIP3 (SEQ ID NO:81-82), REG3-gamma (SEQ ID NO:9-10), MMP7 (SEQ ID NO:93-94), and SAA1 (SEQ ID NO:71-72) in Table 1A; and IL-8 (SEQ ID NO:159-160), Keratin 5B (K5B) (SEQ ID NO:135-136), SLC22A4 (SEQ ID NO:183-184), SLC22A5 (SEQ ID NO:181-182), MMP3 (SEQ ID NO:157-158), and MMP19 (SEQ ID NO:165-166) in Tables 3A. A preferred downregulated marker is GLI-1 (SEQ ID NO: 175-176) in Table 3B. A panel of biomarkers as described herein may include one of, more than one of, or all of these markers. Alternatively, the set of markers include 1, 2, 3, 4, 5, 6 of the indicated markers from Table 1A, and/or 1, 2, 3, 4, 5, 6 of the indicated markers from Table 3A and/or 1 or 2 of the indicated markers in Table 3B.

[0249] Members of lists provided above, as single markers or in any combination, are preferred for use in prognostic and diagnostic assays of the present invention. The IBD markers of the present invention are differentially expressed genes or regions of genes. A differential level of expression of one or more markers in a test sample from a mammalian subject relative to a control can determined from the level of RNA transcripts or expression products detected by one or more of the methods described in further detail below.

[0250] Based on evidence of differential expression of RNA transcripts in normal cells and cells from a mammalian subject having IBD, the present invention provides gene markers for IBD. The IBD markers and associated information provided by the present invention allow physicians to make more intelligent treatment decisions, and to customize the treatment of IBD to the needs of individual patients, thereby maximizing the benefit of treatment and minimizing the exposure of patients to unnecessary treatments, which do not provide any significant benefits and often carry serious risks due to toxic side-effects.

[0251] Multi-analyte gene expression tests can measure the expression level of one or more genes involved in each of several relevant physiologic processes or component cellular characteristics. In some instances the predictive power of the test, and therefore its utility, can be improved by using the expression values obtained for individual genes to calculate a score which is more highly correlated with outcome than is the expression value of the individual genes. For example, the calculation of a quantitative score (recurrence score) that predicts the likelihood of recurrence in estrogen receptor-positive, node-negative breast cancer is describe in U.S. Published Patent Application No. 20050048542. The equation used to calculate such a recurrence score may group genes in order to maximize the predictive value of the recurrence score. The grouping of genes may be performed at least in part based on knowledge of their contribution to physiologic functions or component cellular characteristics such as discussed above. The formation of groups, in addition, can facilitate the mathematical weighting of the contribution of various expression values to the recurrence score. The weighting of a gene group representing a physiological process or component cellular characteristic can reflect the contribution of that process or characteristic to the pathology of the IBD and clinical outcome. Accordingly, in an important aspect, the present invention also provides specific groups of the genes identified herein, that together are more reliable and powerful predictors of outcome than the individual genes or random combinations of the genes identified.

[0252] In addition, based on the determination of a recurrence score, one can choose to partition patients into subgroups at any particular value(s) of the recurrence score, where all patients with values in a given range can be classified as belonging to a particular risk group. Thus, the values chosen will define subgroups of patients with respectively greater or lesser risk.

[0253] The utility of a gene marker in predicting the development or progression of an IBD may not be unique to that marker. An alternative marker having a expression pattern that is closely similar to a particular test marker may be substituted for or used in addition to a test marker and have little impact on the overall predictive utility of the test. The closely similar expression patterns of two genes may result from involvement of both genes in a particular process and/or being under common regulatory control. The present invention specifically includes and contemplates the use of such substitute genes or gene sets in the methods of the present invention.

[0254] The markers and associated information provided by the present invention predicting the development and/or progression of an IBD also have utility in screening patients for inclusion in clinical trials that test the efficacy of drug compounds for the treatment of patients with IBD.

[0255] The markers and associated information provided by the present invention predicting the presence, development and/or progression of an IBD are useful as criterion for determining whether IBD treatment is appropriate. For example, IBD treatment may be appropriate where the results of the test indicate that an IBD marker is differentially expressed in a test sample from an individual relative to a control sample. The individual may be an individual not known to have an IBD, an individual known to have an IBD, an individual previously diagnosed with an IBD undergoing treatment for the IBD, or an individual previously diagnosed with an IBD and having had surgery to address the IBD. In addition, the present invention contemplates methods of treating an IBD. As described below, the diagnostic methods of the present invention may further comprise the step of administering an IBD therapeutic agent to the mammalian subject that provided the test sample in which the differential expression of one or more IBD markers was observed relative to a control. Such methods of treatment would therefore comprise (a) determining the presence of an IBD in a mammalian subject, and (b) administering an IBD therapeutic agent to the mammalian subject.

[0256] In another embodiment, the IBD markers and associated information are used to design or produce a reagent that modulates the level or activity of the gene's transcript or its expression product. Said reagents may include but are not limited to an antisense RNA, a small inhibitory RNA (siRNA), a ribozyme, a monoclonal or polyclonal antibody. In a further embodiment, said gene or its transcript, or more particularly, an expression product of said transcript is used in an (screening) assay to identify a drug compound, wherein said drug compounds is used in the development of a drug to treat an IBD.

[0257] In various embodiments of the inventions, various technological approaches described below are available for determination of expression levels of the disclosed genes. In particular embodiments, the expression level of each gene may be determined in relation to various features of the expression products of the gene including exons, introns, protein epitopes and protein activity. In other embodiments, the expression level of a gene may be inferred from analysis of the structure of the gene, for example from the analysis of the methylation pattern of gene's promoter(s).

[0258] b. Diagnostic Methods of the Invention

[0259] The present invention provides methods of detecting or diagnosing an IBD in a mammalian subject based on differential expression of an IBD marker. In a one embodiment, the methods comprise the use of a panel of IBD markers as discussed above. The panels may include one or more IBD markers selected from Tables 1-3.

[0260] In some embodiments, the panel of IBD markers will include at least 1 IBD marker, at least two IBD markers, at least three IBD markers, at least 4 IBD markers, at least five IBD markers, at least 6 IBD markers, at least 7 IBD marker, at least 8 IBD markers, at least 9 IBD markers, at least 10 IBD markers, at least 11 IBD markers, at least 12 IBD markers, at least 13 IBD markers, at least 14 IBD markers, at least 15 IBD markers, at least 16 IBD markers, at least 17 IBD markers, at least 18 IBD markers, at least 19 IBD markers, or at least 20 IBD markers. In one embodiment, the panel includes markers in increments of five. In another embodiment, the panel includes markers in increments of ten. The panel may include an IBD marker that is overexpressed in IBD relative to a control, an IBD marker that is underexpressed in IBD relative to a control, or IBD markers that are both overexpressed and underexpressed in IBD relative to a control. In a preferred embodiment, the panel includes one or more markers that are upregulated in CD and one or more markers that are downregulated in CD. In another preferred embodiment, the panel includes one or more markers that are upregulated in UC and one or more markers that are downregulated in UC.

[0261] In another embodiment, the panels of the present invention may include an IBD marker that is overexpressed in an active IBD relative to a control, underexpressed in an active IBD relative to a control, or IBD markers that are both overexpressed and underexpressed in an active IBD relative to a control. In another embodiment, the panels of the present invention may include an IBD marker that is overexpressed in an inactive IBD relative to a control, underexpressed in an inactive IBD relative to a control, or IBD markers that are both overexpressed and underexpressed in an inactive IBD relative to a control. In a preferred embodiment, the active IBD is CD. In another preferred embodiment, the inactive IBD is CD.

[0262] In a preferred embodiment, the methods of diagnosing or detecting the presence of an IBD in a mammalian subject comprise determining a differential expression level of RNA transcripts or expression products thereof from a panel of IBD markers in a test sample obtained from the subject relative to the level of expression in a control, wherein the differential level of expression is indicative of the presence of an IBD in the subject from which the test sample was obtained. The differential expression in the test sample may be higher and/or lower relative to a control as discussed herein.

[0263] Differential expression or activity of one or more of the genes provided in the lists above, or the corresponding RNA molecules or encoded proteins in a biological sample obtained from the patient, relative to control, indicates the presence of an IBD in the patient. The control can, for example, be a gene, present in the same cell, which is known to be up-regulated (or down-regulated) in an IBD patient (positive control). Alternatively, or in addition, the control can be the expression level of the same gene in a normal cell of the same cell type (negative control). Expression levels can also be normalized, for example, to the expression levels of housekeeping genes, such as glyceraldehyde-3-phosphate-dehydrogenase (GAPDH) and/or β-actin, or to the expression levels of all genes in the sample tested. In one embodiment, expression of one or more of the above noted genes is deemed positive expression if it is at the median or above, e.g. compared to other samples of the same type. The median expression level can be determined essentially contemporaneously with measuring gene expression, or may have been determined previously. These and other methods are well known in the art, and are apparent to those skilled in the art.

[0264] Methods for identifying IBD patients are provided herein. Of this patient population, patients with an IBD can be identified by determining the expression level of one or more of the genes, the corresponding RNA molecules or encoded proteins in a biological sample comprising cells obtained from the patient. The biological sample can, for example, be a tissue biopsy as described herein.

[0265] The methods of the present invention concern IBD diagnostic assays, and imaging methodologies. In one embodiment, the assays are performed using antibodies as described herein. The invention also provides various immunological assays useful for the detection and quantification of proteins. These assays are performed within various immunological assay formats well known in the art, including but not limited to various types of radioimmunoassays, enzyme-linked immunosorbent assays (ELISA), enzyme-linked immunofluorescent assays (ELIFA), and the like. In addition, immunological imaging methods capable of detecting an IBD characterized by expression of a molecule described herein are also provided by the invention, including but not limited to radioscintigraphic imaging methods using labeled antibodies. Such assays are clinically useful in the detection, monitoring, diagnosis and prognosis of IBD characterized by expression of one or more molecules described herein.

[0266] Another aspect of the present invention relates to methods for identifying a cell that expresses a molecule described herein. The expression profile of a molecule(s) described herein make it a diagnostic marker for IBD. Accordingly, the status of the expression of the molecule(s) provides information useful for predicting a variety of factors including susceptibility to advanced stages of disease, rate of progression, and/or sudden and severe onset of symptoms in an active IBD or an inactive IBD, i.e. flare-ups.

[0267] In one embodiment, the present invention provides methods of detecting an IBD. A test sample from a mammalian subject and a control sample from a known normal mammal are each contacted with an anti-IBD marker antibody or a fragment thereof. The level of IBD marker expression is measured and a differential level of expression in the test sample relative to the control sample is indicative of an IBD in the mammalian subject from which the test sample was obtained. In some embodiments, the level of IBD marker expression in the test sample is determined to be higher than the level of expression in the control, wherein the higher level of expression indicates the presence of an IBD in the subject from which the test sample was obtained. In another embodiments, the level of IBD marker expression in the test sample is determined to be lower than the level of expression in the control, wherein the lower level of expression indicates the presence of an IBD in the subject from which the test sample was obtained.

[0268] In another embodiment, the IBD detected by the methods of the present invention is the recurrence or flareup of an IBD in the mammalian subject.

[0269] In preferred embodiments, the methods are employed to detect the flare-up of an IBD or a recurrence of an IBD in a mammalian subject previously determined to have an IBD who underwent treatment for the IBD, such as drug therapy or a surgical procedure. Following initial detection of an IBD, additional test samples may be obtained from the mammalian subject found to have an IBD. The additional sample may be obtained hours, days, weeks, or months after the initial sample was taken. Those of skill in the art will appreciate the appropriate schedule for obtaining such additional samples, which may include second, third, fourth, fifth, sixth, etc. test samples. The initial test sample and the additional sample (and alternately a control sample as described herein) are contacted with an anti-IBD marker antibody. The level of IBD marker expression is measured and a differential level of expression in the additional test sample as compared to the initial test sample is indicative of a flare-up in or a recurrence of an IBD in the mammalian subject from which the test sample was obtained.

[0270] In one aspect, the methods of the present invention are directed to a determining step. In one embodiment, the determining step comprises measuring the level of expression of one or more IBD markers in a test sample relative to a control. Typically, measuring the level of IBD marker expression, as described herein, involves analyzing a test sample for differential expression of an IBD marker relative to a control by performing one or more of the techniques described herein. The expression level data obtained from a test sample and a control are compared for differential levels of expression. In another embodiment, the determining step further comprises an examination of the test sample and control expression data to assess whether an IBD is present in the subject from which the test sample was obtained.

[0271] In some embodiments, the determining step comprises the use of a software program executed by a suitable processor for the purpose of (i) measuring the differential level of IBD marker expression in a test sample and a control; and/or (ii) analyzing the data obtained from measuring differential level of IBD marker expression in a test sample and a control. Suitable software and processors are well known in the art and are commercially available. The program may be embodied in software stored on a tangible medium such as CD-ROM, a floppy disk, a hard drive, a DVD, or a memory associated with the processor, but persons of ordinary skill in the art will readily appreciate that the entire program or parts thereof could alternatively be executed by a device other than a processor, and/or embodied in firmware and/or dedicated hardware in a well known manner.

[0272] Following the determining step, the measurement results, findings, diagnoses, predictions and/or treatment recommendations are typically recorded and communicated to technicians, physicians and/or patients, for example. In certain embodiments, computers will be used to communicate such information to interested parties, such as, patients and/or the attending physicians. In some embodiments, the assays will be performed or the assay results analyzed in a country or jurisdiction which differs from the country or jurisdiction to which the results or diagnoses are communicated.

[0273] In a preferred embodiment, a diagnosis, prediction and/or treatment recommendation based on the level of expression of one or more IBD markers disclosed herein measured in a test subject of having one or more of the IBD markers herein is communicated to the subject as soon as possible after the assay is completed and the diagnosis and/or prediction is generated. The results and/or related information may be communicated to the subject by the subject's treating physician. Alternatively, the results may be communicated directly to a test subject by any means of communication, including writing, electronic forms of communication, such as email, or telephone. Communication may be facilitated by use of a computer, such as in case of email communications. In certain embodiments, the communication containing results of a diagnostic test and/or conclusions drawn from and/or treatment recommendations based on the test, may be generated and delivered automatically to the subject using a combination of computer hardware and software which will be familiar to artisans skilled in telecommunications. One example of a healthcare-oriented communications system is described in U.S. Pat. No. 6,283,761; however, the present invention is not limited to methods which utilize this particular communications system. In certain embodiments of the methods of the invention, all or some of the method steps, including the assaying of samples, diagnosing of diseases, and communicating of assay results or diagnoses, may be carried out in diverse (e.g., foreign) jurisdictions.

[0274] The invention provides assays for detecting the differential expression of an IBD marker in tissues associated with the gastrointestinal tract including, without limitation, ascending colon tissue, descending colon tissue, sigmoid colon tissue, and terminal ileum tissue; as well expression in other biological samples such as serum, semen, bone, prostate, urine, cell preparations, and the like. Methods for detecting differential expression of an IBD marker are also well known and include, for example, immunoprecipitation, immunohistochemical analysis, Western blot analysis, molecular binding assays, ELISA, ELIFA and the like. For example, a method of detecting the differential expression of an IBD marker in a biological sample comprises first contacting the sample with an anti-IBD marker antibody, an IBD marker-reactive fragment thereof, or a recombinant protein containing an antigen-binding region of an anit-IBD marker antibody; and then detecting the binding of an IBD marker protein in the sample.

[0275] In various embodiments of the inventions, various technological approaches are available for determination of expression levels of the disclosed genes, including, without limitation, RT-PCR, microarrays, serial analysis of gene expression (SAGE) and Gene Expression Analysis by Massively Parallel Signature Sequencing (MPSS), which will be discussed in detail below. In particular embodiments, the expression level of each gene may be determined in relation to various features of the expression products of the gene including exons, introns, protein epitopes and protein activity. In other embodiments, the expression level of a gene may be inferred from analysis of the structure of the gene, for example from the analysis of the methylation pattern of gene's promoter(s).

[0276] c. Therapeutic Methods of the Invention

[0277] The present invention provides therapeutic methods of treating an IBD in a subject in need that comprise detecting the presence of an IBD in a mammalian subject by the diagnostic methods described herein and then administering to the mammalian subject an IBD therapeutic agent. Those of ordinary skill in the art will appreciate the various IBD therapeutic agents that may be suitable for use in the present invention (see St Clair Jones, Hospital Pharmacist, May 2006, Vol. 13; pages 161-166, hereby incorporated by reference in its entirety). The present invention contemplates methods of IBD treatment in which one or more IBD therapeutic agents are administered to a subject in need. In one embodiment, the IBD therapeutic agent is one or more of an aminosalicylate, a corticosteroid, and an immunosuppressive agent. In a preferred embodiment, the aminosalicylate is one of sulfasalazine, olsalazine, mesalamine, balsalazide, and asacol. In another preferred embodiment, multiple aminosalicylates are co-administered, such as a combination of sulfasalazine and olsalazine. In other preferred embodiments, the corticosteroid may be budesonide, prednisone, prednisolone, methylprednisolone, 6-mercaptopurine (6-MP), azathioprine, methotrexate, and cyclosporin. In other preferred embodiments, the IBD therapeutic agent may an antibiotic, such as ciprofloxacin and/or metronidazole; or an antibody-based agent such as infliximab (Remicade®).

[0278] The least toxic IBD therapeutic agents which patients are typically treated with are the aminosalicylates. Sulfasalazine (Azulfidine), typically administered four times a day, consists of an active molecule of aminosalicylate (5-ASA) which is linked by an azo bond to a sulfapyridine. Anaerobic bacteria in the colon split the azo bond to release active 5-ASA. However, at least 20% of patients cannot tolerate sulfapyridine because it is associated with significant side-effects such as reversible sperm abnormalities, dyspepsia or allergic reactions to the sulpha component. These side effects are reduced in patients taking olsalazine. However, neither sulfasalazine nor olsalazine are effective for the treatment of small bowel inflammation. Other formulations of 5-ASA have been developed which are released in the small intestine (e.g. mesalamine and asacol). Normally it takes 6-8 weeks for 5-ASA therapy to show full efficacy. Patients who do not respond to 5-ASA therapy, or who have a more severe disease, are prescribed corticosteroids. However, this is a short term therapy and cannot be used as a maintenance therapy. Clinical remission is achieved with corticosteroids within 2-4 weeks, however the side effects are significant and include Cushing goldface, facial hair, severe mood swings and sleeplessness. The response to sulfasalazine and 5-aminosalicylate preparations is poor in CD, fair to mild in early ulcerative colitis and poor in severe UC. If these agents fail, powerful immunosuppressive agents such as cyclosporine, prednisone, 6-mercaptopurine or azathioprine (converted in the liver to 6-mercaptopurine) are typically tried. For CD patients, the use of corticosteroids and other immunosuppressives must be carefully monitored because of the high risk of intra-abdominal sepsis originating in the fistulas and abscesses common in this disease. Approximately 25% of IBD patients will require surgery (colectomy) during the course of the disease.

[0279] Treatment of an IBD may include a surgical procedure, including without limitation, a bowel resection, anastomosis, a colectomy, a proctocolectomy, and an ostomy, or any combination thereof.

[0280] In addition to pharmaceutical medicine and surgery, nonconventional treatments for IBD such as nutritional therapy have also been attempted. For example, Flexical®, a semi-elemental formula, has been shown to be as effective as the steroid prednisolone. Sanderson et al., Arch. Dis. Child. 51:123-7 (1987). However, semi-elemental formulas are relatively expensive and are typically unpalatable—thus their use has been restricted. Nutritional therapy incorporating whole proteins has also been attempted to alleviate the symptoms of IBD. Giafer et al., Lancet 335: 816-9 (1990). U.S. Pat. No. 5,461,033 describes the use of acidic casein isolated from bovine milk and TGF-2. Beattie et al., Aliment. Pharmacol. Ther. 8: 1-6 (1994) describes the use of casein in infant formula in children with IBD. U.S. Pat. No. 5,952,295 describes the use of casein in an enteric formulation for the treatment of IBD. However, while nutrional therapy is non-toxic, it is a palliative treatment and does not treat the underlying cause of the disease.

[0281] The present invention contemplates methods of IBD treatment, including for example, in vitro, ex vivo and in vivo therapeutic methods. The invention provides methods useful for treating an IBD in a subject in need upon the detection of an IBD disease state in the subject associated with the expression of one or more IBD markers disclosed herein, such as increased and/or decreased IBD marker expression. In one preferred embodiment, the method comprises (a) determining that the level of expression of (i) one or more nucleic acids encoding one or more polypeptides selected from Tables 1, 2, or 3; or (ii) RNA transcripts or expression products thereof of one or more genes listed in Tables 1, 2, and 3 in a test sample obtained from said subject is higher and/or lower relative to the level of expression in a control, wherein said higher and/or lower level of expression is indicative of the presence of an IBD in the subject from which the test sample was obtained; and (b) administering to said subject an effective amount of an IBD therapeutic agent. The determining step (a) may comprise the measurement of the expression of multiple IBD marker

[0282] The method of treatment comprises detecting the IBD and administering an effective amount of an IBD therapeutic agent to a subject in need of such treatment. In some embodiments, the IBD disease state is associated with an increased and/or decrease in expression of one or more IBD markers.

[0283] In one aspect, the invention provides methods for treating or preventing an IBD, the methods comprising detecting the presence of an IBD in a subject and administering an effective amount of an IBD therapeutic agent to the subject. It is understood that any suitable IBD therapeutic agent may be used in the methods of treatment, including aminosalicylates, corticosteroids, and immunosuppressive agents as discussed herein.

[0284] In any of the methods herein, one may administer to the subject or patient along with a single IBD therapeutic agent discussed herein an effective amount of a second medicament (where the single IBD therapeutic agent herein is a first medicament), which is another active agent that can treat the condition in the subject that requires treatment. For instance, an aminosalicylate may be co-administered with a corticosteroid, an immunosuppressive agent, or another aminosalicylate. The type of such second medicament depends on various factors, including the type of IBD, its severity, the condition and age of the patient, the type and dose of first medicament employed, etc.

[0285] Such treatments using first and second medicaments include combined administration (where the two or more agents are included in the same or separate formulations), and separate administration, in which case, administration of the first medicament can occur prior to, and/or following, administration of the second medicament. In general, such second medicaments may be administered within 48 hours after the first medicaments are administered, or within 24 hours, or within 12 hours, or within 3-12 hours after the first medicament, or may be administered over a pre-selected period of time, which is preferably about 1 to 2 days, about 2 to 3 days, about 3 to 4 days, about 4 to 5 days, about 5 to 6 days, or about 6 to 7 days.

[0286] The first and second medicaments can be administered concurrently, sequentially, or alternating with the first and second medicament or upon non-responsiveness with other therapy. Thus, the combined administration of a second medicament includes co-administration (concurrent administration), using separate formulations or a single pharmaceutical formulation, and consecutive administration in either order, wherein preferably there is a time period while both (or all) medicaments simultaneously exert their biological activities. All these second medicaments may be used in combination with each other or by themselves with the first medicament, so that the express “second medicament” as used herein does not mean it is the only medicament besides the first medicament, respectively. Thus, the second medicament need not be one medicament, but may constitute or comprise more than one such drug. These second medicaments as set forth herein are generally used in the same dosages and with administration routes as the first medicaments, or about from 1 to 99% of the dosages of the first medicaments. If such second medicaments are used at all, preferably, they are used in lower amounts than if the first medicament were not present, especially in subsequent dosings beyond the initial dosing with the first medicament, so as to eliminate or reduce side effects caused thereby.

[0287] Where the methods of the present invention comprise administering one or more IBD therapeutic agent to treat or prevent an IBD, it may be particularly desirable to combine the administering step with a surgical procedure that is also performed to treat or prevent the IBD. The IBD surgical procedures contemplated by the present invention include, without limitation, a bowel resection, anastomosis, a colectomy, a proctocolectomy, and an ostomy, or any combination thereof. For instance, an IBD therapeutic agent described herein may be combined with a colectomy in a treatment scheme, e.g. in treating an IBD. Such combined therapies include and separate administration, in which case, administration of the IBD therapeutic agent can occur prior to, and/or following, the surgical procedure.

[0288] Treatment with a combination of one or more IBD therapeutic agents; or a combination of one or more IBD therapeutic agents and a surgical procedure described herein preferably results in an improvement in the signs or symptoms of an IBD. For instance, such therapy may result in an improvement in the subject receiving the IBD therapeutic agent treatment regimen and a surgical procedure, as evidenced by a reduction in the severity of the pathology of the IBD.

[0289] The IBD therapeutic agent(s) is/are administered by any suitable means, including parenteral, subcutaneous, intraperitoneal, intrapulmonary, and intranasal, and, if desired for local treatment, intralesional administration. Parenteral infusions include intramuscular, intravenous, intraarterial, intraperitoneal, or subcutaneous administration. Dosing can be by any suitable route, e.g. by injections, such as intravenous or subcutaneous injections, depending in part on whether the administration is brief or chronic.

[0290] The IBD therapeutic agent(s) compositions administered according to the methods of the invention will be formulated, dosed, and administered in a fashion consistent with good medical practice. Factors for consideration in this context include the particular disorder being treated, the particular mammal being treated, the clinical condition of the individual patient, the cause of the disorder, the site of delivery of the agent, the method of administration, the scheduling of administration, and other factors known to medical practitioners. The first medicament(s) need not be, but is optionally formulated with one or more additional medicament(s) (e.g. second, third, fourth, etc. medicaments) described herein. The effective amount of such additional medicaments depends on the amount of the first medicament present in the formulation, the type of disorder or treatment, and other factors discussed above. These are generally used in the same dosages and with administration routes as used hereinbefore or about from 1 to 99% of the heretofore employed dosages.

[0291] For the prevention or treatment of an IBD, the appropriate dosage of an IBD therapeutic agent (when used alone or in combination with other agents) will depend on the type of disease to be treated, the type of IBD therapeutic agent(s), the severity and course of the disease, whether the IBD therapeutic agent is administered for preventive or therapeutic purposes, previous therapy, the patient's clinical history and response to the IBD therapeutic agent, and the discretion of the attending physician. The IBD therapeutic agent is suitably administered to the patient at one time or over a series of treatments. Depending on the type and severity of the disease, about 1 ug/kg to 15 mg/kg (e.g. 0.1 mg/kg-10 mg/kg) of IBD therapeutic agent is an initial candidate dosage for administration to the patient, whether, for example, by one or more separate administrations, or by continuous infusion. One typical daily dosage might range from about 1 ug/kg to 100 mg/kg or more, depending on the factors mentioned above. For repeated administrations over several days or longer, depending on the condition, the treatment is sustained until a desired suppression of disease symptoms occurs. One exemplary dosage of the IBD therapeutic agent would be in the range from about 0.05 mg/kg to about 10 mg/kg. Thus, one or more doses of about 0.5 mg/kg, 2.0 mg/kg, 4.0 mg/kg or 10 mg/kg (or any combination thereof) may be administered to the patient. Such doses may be administered intermittently, e.g. every week or every three weeks (e.g. such that the patient receives from about two to about twenty, e.g. about six doses of the IBD therapeutic agent). An initial higher loading dose, followed by one or more lower doses may be administered. An exemplary dosing regimen comprises administering an initial loading dose of about 4 mg/kg, followed by a weekly maintenance dose of about 2 mg/kg of the IBD therapeutic agent. However, other dosage regimens may be useful. The progress of this therapy is easily monitored by conventional techniques and assays.

### B.2. GENE EXPRESSION PROFILING

[0292] In general, methods of gene expression profiling can be divided into two large groups: methods based on hybridization analysis of polynucleotides, and other methods based on biochemical detection or sequencing of polynucleotides. The most commonly used methods known in the art for the quantification of mRNA expression in a sample include northern blotting and in situ hybridization (Parker & Barnes, Methods in Molecular Biology 106:247-283 (1999)); RNAse protection assays (Hod, Biotechniques 13:852-854 (1992)); and reverse transcription polymerase chain reaction (RT-PCR) (Weis et al., Trends in Genetics 8:263-264 (1992)). Alternatively, antibodies may be employed that can recognize specific duplexes, including DNA duplexes, RNA duplexes, and DNA-RNA hybrid duplexes or DNA-protein duplexes. Various methods for determining expression of mRNA or protein include, but are not limited to, gene expression profiling, polymerase chain reaction (PCR) including quantitative real time PCR (qRT-PCR), microarray analysis that can be performed by commercially available equipment, following manufacturer's protocols, such as by using the Affymetrix GenChip technology, serial analysis of gene expression (SAGE) (Velculescu et al., Science 270:484-487 (1995); and Velculescu et al., Cell 88:243-51 (1997)), MassARRAY, Gene Expression Analysis by Massively Parallel Signature Sequencing (MPSS) (Brenner et al., Nature Biotechnology 18:630-634 (2000)), proteomics, immunohistochemistry (1HC), etc. Preferably mRNA is quantified. Such mRNA analysis is preferably performed using the technique of polymerase chain reaction (PCR), or by microarray analysis. Where PCR is employed, a preferred form of PCR is quantitative real time PCR (qRT-PCR).

[0293] a. Reverse Transcriptase PCR(RT-PCR)

[0294] Of the techniques listed above, the most sensitive and most flexible quantitative method is RT-PCR, which can be used to compare mRNA levels in different sample populations, in normal and test sample tissues, to characterize patterns of gene expression, to discriminate between closely related mRNAs, and to analyze RNA structure.

[0295] The first step is the isolation of mRNA from a target sample. The starting material is typically total RNA isolated from colonic tissue biopsies. Thus, RNA can be isolated from a variety of tissues, including without limitation, the terminal ileum, the ascending colon, the descending colon, and the sigmoid colon. In addition, the colonic tissue from which a biopsy is obtained may be from an inflamed and/or a non-inflamed colonic area.

[0296] In one embodiment, the mRNA is obtained from a biopsy as defined above wherein the biopsy is obtained from the left colon or from the right colon. As used herein, the “left colon” refers to the sigmoideum and rectosigmoideum and the “right colon” refers to the cecum.

[0297] General methods for mRNA extraction are well known in the art and are disclosed in standard textbooks of molecular biology, including Ausubel et al., Current Protocols of Molecular Biology, John Wiley and Sons (1997). In particular, RNA isolation can be performed using purification kit, buffer set and protease from commercial manufacturers, such as Qiagen, according to the manufacturer's instructions. Total RNA from tissue samples can be isolated using RNA Stat-60 (Tel-Test). RNA prepared from a biopsy can be isolated, for example, by cesium chloride density gradient centrifugation.

[0298] As RNA cannot serve as a template for PCR, the first step in gene expression profiling by RT-PCR is the reverse transcription of the RNA template into cDNA, followed by its exponential amplification in a PCR reaction. The two most commonly used reverse transcriptases are avilo myeloblastosis virus reverse transcriptase (AMV-RT) and Moloney murine leukemia virus reverse transcriptase (MMLV-RT). The reverse transcription step is typically primed using specific primers, random hexamers, or oligo-dT primers, depending on the circumstances and the goal of expression profiling. For example, extracted RNA can be reverse-transcribed using a GeneAmp RNA PCR kit (Perkin Elmer, Calif., USA), following the manufacturer's instructions. The derived cDNA can then be used as a template in the subsequent PCR reaction.

[0299] Although the PCR step can use a variety of thermostable DNA-dependent DNA polymerases, it typically employs the Taq DNA polymerase, which has a 5′-3′ nuclease activity but lacks a 3′-5′ proofreading endonuclease activity. Thus, TaqMan° PCR typically utilizes the 5′-nuclease activity of Taq or Tth polymerase to hydrolyze a hybridization probe bound to its target amplicon, but any enzyme with equivalent 5′ nuclease activity can be used. Two oligonucleotide primers are used to generate an amplicon typical of a PCR reaction. A third oligonucleotide, or probe, is designed to detect nucleotide sequence located between the two PCR primers. The probe is non-extendible by Taq DNA polymerase enzyme, and is labeled with a reporter fluorescent dye and a quencher fluorescent dye. Any laser-induced emission from the reporter dye is quenched by the quenching dye when the two dyes are located close together as they are on the probe. During the amplification reaction, the Taq DNA polymerase enzyme cleaves the probe in a template-dependent manner. The resultant probe fragments disassociate in solution, and signal from the released reporter dye is free from the quenching effect of the second fluorophore. One molecule of reporter dye is liberated for each new molecule synthesized, and detection of the unquenched reporter dye provides the basis for quantitative interpretation of the data.

[0300] TaqMan® RT-PCR can be performed using commercially available equipment, such as, for example, ABI PRISM 7700™ Sequence Detection System™ (Perkin-Elmer-Applied Biosystems, Foster City, Calif., USA), or Lightcycler (Roche Molecular Biochemicals, Mannheim, Germany). In a preferred embodiment, the 5′ nuclease procedure is run on a real-time quantitative PCR device such as the ABI PRISM 7700™ Sequence Detection System™. The system consists of a thermocycler, laser, charge-coupled device (CCD), camera and computer. The system amplifies samples in a 96-well format on a thermocycler. During amplification, laser-induced fluorescent signal is collected in real-time through fiber optics cables for all 96 wells, and detected at the CCD. The system includes software for running the instrument and for analyzing the data.

[0301] 5′-Nuclease assay data are initially expressed as Ct, or the threshold cycle. As discussed above, fluorescence values are recorded during every cycle and represent the amount of product amplified to that point in the amplification reaction. The point when the fluorescent signal is first recorded as statistically significant is the threshold cycle (Ct).

[0302] To minimize errors and the effect of sample-to-sample variation, RT-PCR is usually performed using an internal standard. The ideal internal standard is expressed at a constant level among different tissues, and is unaffected by the experimental treatment. RNAs most frequently used to normalize patterns of gene expression are mRNAs for the housekeeping genes glyceraldehyde-3-phosphate-dehydrogenase (GAPDH) and β-actin.

[0303] A more recent variation of the RT-PCR technique is the real time quantitative PCR, which measures PCR product accumulation through a dual-labeled fluorigenic probe (i.e., TaqMan® probe). Real time PCR is compatible both with quantitative competitive PCR, where internal competitor for each target sequence is used for normalization, and with quantitative comparative PCR using a normalization gene contained within the sample, or a housekeeping gene for RT-PCR. For further details see, e.g. Held et al., Genome Research 6:986-994 (1996).

[0304] According to one aspect of the present invention, PCR primers and probes are designed based upon intron sequences present in the gene to be amplified. In this embodiment, the first step in the primer/probe design is the delineation of intron sequences within the genes. This can be done by publicly available software, such as the DNA BLAT software developed by Kent, W. J., Genome Res. 12(4):656-64 (2002), or by the BLAST software including its variations. Subsequent steps follow well established methods of PCR primer and probe design.

[0305] In order to avoid non-specific signals, it is important to mask repetitive sequences within the introns when designing the primers and probes. This can be easily accomplished by using the Repeat Masker program available on-line through the Baylor College of Medicine, which screens DNA sequences against a library of repetitive elements and returns a query sequence in which the repetitive elements are masked. The masked intron sequences can then be used to design primer and probe sequences using any commercially or otherwise publicly available primer/probe design packages, such as Primer Express (Applied Biosystems); MGB assay-by-design (Applied Biosystems); Primer3 (Steve Rozen and Helen J. Skaletsky (2000) Primer3 on the WWW for general users and for biologist programmers. In: Krawetz S, Misener S (eds) Bioinformatics Methods and Protocols: Methods in Molecular Biology. Humana Press, Totowa, N.J., pp 365-386).

[0306] The most important factors considered in PCR primer design include primer length, melting temperature (Tm), and G/C content, specificity, complementary primer sequences, and 3′-end sequence. In general, optimal PCR primers are generally 17-30 bases in length, and contain about 20-80%, such as, for example, about 50-60% G+C bases. Tm's between 50 and 80° C., e.g. about 50 to 70° C. are typically preferred.

[0307] For further guidelines for PCR primer and probe design see, e.g. Dieffenbach, C. W. et al., “General Concepts for PCR Primer Design” in: PCR Primer, A Laboratory Manual, Cold Spring Harbor Laboratory Press, New York, 1995, pp. 133-155; Innis and Gelfand, “Optimization of PCRs” in: PCR Protocols, A Guide to Methods and Applications, CRC Press, London, 1994, pp. 5-11; and Plasterer, T. N. Primerselect: Primer and probe design. Methods Mol. Biol. 70:520-527 (1997), the entire disclosures of which are hereby expressly incorporated by reference.

[0308] Further PCR-based techniques include, for example, differential display (Liang and Pardee, Science 257:967-971 (1992)); amplified fragment length polymorphism (iAFLP) (Kawamoto et al., Genome Res. 12:1305-1312 (1999)); BeadArray™ technology (Illumina, San Diego, Calif.; Oliphant et al., Discovery of Markers for Disease (Supplement to Biotechniques), June 2002; Ferguson et al., Analytical Chemistry 72:5618 (2000)); BeadsArray for Detection of Gene Expression (BADGE), using the commercially available Luminex 100 LabMAP system and multiple color-coded microspheres (Luminex Corp., Austin, Tex.) in a rapid assay for gene expression (Yang et al., Genome Res. 11:1888-1898 (2001)); and high coverage expression profiling (HiCEP) analysis (Fukumura et al., Nucl. Acids. Res. 31(16) e94 (2003)).

[0309] b. Microarrays

[0310] Differential gene expression can also be identified, or confirmed using the microarray technique. Thus, the expression profile of IBD-associated genes can be measured in either fresh or paraffin-embedded tissue, using microarray technology. In this method, polynucleotide sequences of interest (including cDNAs and oligonucleotides) are plated, or arrayed, on a microchip substrate. The arrayed sequences are then hybridized with specific DNA probes from cells or tissues of interest. Just as in the RT-PCR method, the source of mRNA typically is total RNA isolated from biopsy tissue or cell lines derived from cells obtained from a subject having an IBD, and corresponding normal tissues or cell lines. Thus RNA can be isolated from a variety of colonic tissues or colonic tissue-based cell lines.

[0311] In a specific embodiment of the microarray technique, PCR amplified inserts of cDNA clones are applied to a substrate in a dense array. Preferably at least 10,000 nucleotide sequences are applied to the substrate. The microarrayed genes, immobilized on the microchip at 10,000 elements each, are suitable for hybridization under stringent conditions. Fluorescently labeled cDNA probes may be generated through incorporation of fluorescent nucleotides by reverse transcription of RNA extracted from tissues of interest. Labeled cDNA probes applied to the chip hybridize with specificity to each spot of DNA on the array. After stringent washing to remove non-specifically bound probes, the chip is scanned by confocal laser microscopy or by another detection method, such as a CCD camera. Quantitation of hybridization of each arrayed element allows for assessment of corresponding mRNA abundance. With dual color fluorescence, separately labeled cDNA probes generated from two sources of RNA are hybridized pairwise to the array. The relative abundance of the transcripts from the two sources corresponding to each specified gene is thus determined simultaneously. The miniaturized scale of the hybridization affords a convenient and rapid evaluation of the expression pattern for large numbers of genes. Such methods have been shown to have the sensitivity required to detect rare transcripts, which are expressed at a few copies per cell, and to reproducibly detect at least approximately two-fold differences in the expression levels (Schena et al., Proc. Natl. Acad. Sci. USA 93(2):106-149 (1996)). Microarray analysis can be performed by commercially available equipment, following manufacturer's protocols, such as by using the Affymetrix GenChip technology, or Incyte's microarray technology, or Agilent's Whole Human Genome microarray technology.

[0312] c. Serial Analysis of Gene Expression (SAGE)

[0313] Serial analysis of gene expression (SAGE) is a method that allows the simultaneous and quantitative analysis of a large number of gene transcripts, without the need of providing an individual hybridization probe for each transcript. First, a short sequence tag (about 10-14 bp) is generated that contains sufficient information to uniquely identify a transcript, provided that the tag is obtained from a unique position within each transcript. Then, many transcripts are linked together to form long serial molecules, that can be sequenced, revealing the identity of the multiple tags simultaneously. The expression pattern of any population of transcripts can be quantitatively evaluated by determining the abundance of individual tags, and identifying the gene corresponding to each tag. For more details see, e.g. Velculescu et al., Science 270:484-487 (1995); and Velculescu et al., Cell 88:243-51 (1997).

[0314] d. MassARRAY Technology

[0315] In the MassARRAY-based gene expression profiling method, developed by Sequenom, Inc. (San Diego, Calif.) following the isolation of RNA and reverse transcription, the obtained cDNA is spiked with a synthetic DNA molecule (competitor), which matches the targeted cDNA region in all positions, except a single base, and serves as an internal standard. The cDNA/competitor mixture is PCR amplified and is subjected to a post-PCR shrimp alkaline phosphatase (SAP) enzyme treatment, which results in the dephosphorylation of the remaining nucleotides. After inactivation of the alkaline phosphatase, the PCR products from the competitor and cDNA are subjected to primer extension, which generates distinct mass signals for the competitor- and cDNA-derives PCR products. After purification, these products are dispensed on a chip array, which is pre-loaded with components needed for analysis with matrix-assisted laser desorption ionization time-of-flight mass spectrometry (MALDI-TOF MS) analysis. The cDNA present in the reaction is then quantified by analyzing the ratios of the peak areas in the mass spectrum generated. For further details see, e.g. Ding and Cantor, Proc. Natl. Acad. Sci. USA 100:3059-3064 (2003).

[0316] e. Gene Expression Analysis by Massively Parallel Signature Sequencing (MPSS)

[0317] This method, described by Brenner et al., Nature Biotechnology 18:630-634 (2000), is a sequencing approach that combines non-gel-based signature sequencing with in vitro cloning of millions of templates on separate 5 μm diameter microbeads. First, a microbead library of DNA templates is constructed by in vitro cloning. This is followed by the assembly of a planar array of the template-containing microbeads in a flow cell at a high density (typically greater than 3×10⁶ microbeads/cm²). The free ends of the cloned templates on each microbead are analyzed simultaneously, using a fluorescence-based signature sequencing method that does not require DNA fragment separation. This method has been shown to simultaneously and accurately provide, in a single operation, hundreds of thousands of gene signature sequences from a yeast cDNA library.

[0318] The steps of a representative protocol for profiling gene expression using fixed, paraffin-embedded tissues as the RNA source, including mRNA isolation, purification, primer extension and amplification are given in various published journal articles (for example: Godfrey et al. J. Molec. Diagnostics 2: 84-91 (2000); Specht et al., Am. J. Pathol. 158: 419-29 (2001)). Briefly, a representative process starts with cutting about 10 microgram thick sections of paraffin-embedded tissue samples. The mRNA is then extracted, and protein and DNA are removed. General methods for mRNA extraction are well known in the art and are disclosed in standard textbooks of molecular biology, including Ausubel et al., Current Protocols of Molecular Biology, John Wiley and Sons (1997). Methods for RNA extraction from paraffin embedded tissues are disclosed, for example, in Rupp and Locker, Lab Invest. 56:A67 (1987), and De Andrés et al., BioTechniques 18:42044 (1995). In particular, RNA isolation can be performed using purification kit, buffer set and protease from commercial manufacturers, such as Qiagen, according to the manufacturer's instructions. For example, total RNA from cells in culture can be isolated using Qiagen RNeasy mini-columns. Other commercially available RNA isolation kits include MasterPure™ Complete DNA and RNA Purification Kit (EPICENTRE®, Madison, Wis.), and Paraffin Block RNA Isolation Kit (Ambion, Inc.). Total RNA from tissue samples can be isolated using RNA Stat-60 (Tel-Test). RNA prepared from tissues can be isolated, for example, by cesium chloride density gradient centrifugation. After analysis of the RNA concentration, RNA repair and/or amplification steps may be included, if necessary, and RNA is reverse transcribed using gene specific promoters followed by PCR. Preferably, real time PCR is used, which is compatible both with quantitative competitive PCR, where internal competitor for each target sequence is used for normalization, and with quantitative comparative PCR using a normalization gene contained within the sample, or a housekeeping gene for RT-PCR. For further details see, e.g. “PCR: The Polymerase Chain Reaction”, Mullis et al., eds., 1994; and Held et al., Genome Research 6:986-994 (1996). Finally, the data are analyzed to identify the best treatment option(s) available to the patient on the basis of the characteristic gene expression pattern identified in the sample examined.

[0319] f. Immunohistochemistry

[0320] Immunohistochemistry methods are also suitable for detecting the expression levels of the IBD markers of the present invention. Thus, antibodies or antisera, preferably polyclonal antisera, and most preferably monoclonal antibodies specific for each marker are used to detect expression. The antibodies can be detected by direct labeling of the antibodies themselves, for example, with radioactive labels, fluorescent labels, hapten labels such as, biotin, or an enzyme such as horse radish peroxidase or alkaline phosphatase. Alternatively, unlabeled primary antibody is used in conjunction with a labeled secondary antibody, comprising antisera, polyclonal antisera or a monoclonal antibody specific for the primary antibody. Immunohistochemistry protocols and kits are well known in the art and are commercially available.

[0321] Expression levels can also be determined at the protein level, for example, using various types of immunoassays or proteomics techniques.

[0322] In immunoassays, the target diagnostic protein marker is detected by using an antibody specifically binding to the marks. The antibody typically will be labeled with a detectable moiety. Numerous labels are available which can be generally grouped into the following categories:

[0323] Radioisotopes, such as 35S, 14C, 125I, 3H, and 131I. The antibody can be labeled with the radioisotope using the techniques described in Current Protocols in Immunology, Volumes 1 and 2, Coligen et al. (1991) Ed. Wiley-Interscience, New York, N.Y., Pubs. for example and radioactivity can be measured using scintillation counting.

[0324] Fluorescent labels such as rare earth chelates (europium chelates) or fluorescein and its derivatives, rhodamine and its derivatives, dansyl, Lissamine, phycoerythrin and Texas Red are available. The fluorescent labels can be conjugated to the antibody using the techniques disclosed in Current Protocols in Immunology, supra, for example. Fluorescence can be quantified using a fluorimeter.

[0325] Various enzyme-substrate labels are available and U.S. Pat. No. 4,275,149 provides a review of some of these. The enzyme generally catalyzes a chemical alteration of the chromogenic substrate which can be measured using various techniques. For example, the enzyme may catalyze a color change in a substrate, which can be measured spectrophotometrically. Alternatively, the enzyme may alter the fluorescence or chemiluminescence of the substrate. Techniques for quantifying a change in fluorescence are described above. The chemiluminescent substrate becomes electronically excited by a chemical reaction and may then emit light which can be measured (using a chemiluminometer, for example) or donates energy to a fluorescent acceptor. Examples of enzymatic labels include luciferases (e.g., firefly luciferase and bacterial luciferase; U.S. Pat. No. 4,737,456), luciferin, 2,3-dihydrophthalazinediones, malate dehydrogenase, urease, peroxidase such as horseradish peroxidase (HRPO), alkaline phosphatase, β-galactosidase, glucoamylase, lysozyme, saccharide oxidases (e.g., glucose oxidase, galactose oxidase, and glucose-6-phosphate dehydrogenase), heterocyclic oxidases (such as uricase and xanthine oxidase), lactoperoxidase, microperoxidase, and the like. Techniques for conjugating enzymes to antibodies are described in O'Sullivan et al. (1981) Methods for the Preparation of Enzyme-Antibody Conjugates for use in Enzyme Immunoassay, in Methods in Enzym. (ed J. Langone & H. Van Vunakis), Academic press, New York 73:147-166.

[0326] Examples of enzyme-substrate combinations include, for example: horseradish peroxidase (HRPO) with hydrogen peroxidase as a substrate, wherein the hydrogen peroxidase oxidizes a dye precursor (e.g., orthophenylene diamine (OPD) or 3,3′,5,5′-tetramethyl benzidine hydrochloride (TMB)); alkaline phosphatase (AP) with para-Nitrophenyl phosphate as chromogenic substrate; and β-D-galactosidase (β-D-Gal) with a chromogenic substrate (e.g., p-nitrophenyl-β-D-galactosidase) or fluorogenic substrate 4-methylumbelliferyl-β-D-galactosidase.

[0327] Numerous other enzyme-substrate combinations are available to those skilled in the art. For a general review of these, see U.S. Pat. Nos. 4,275,149 and 4,318,980.

[0328] Sometimes, the label is indirectly conjugated with the antibody. The skilled artisan will be aware of various techniques for achieving this. For example, the antibody can be conjugated with biotin and any of the three broad categories of labels mentioned above can be conjugated with avidin, or vice versa. Biotin binds selectively to avidin and thus, the label can be conjugated with the antibody in this indirect manner. Alternatively, to achieve indirect conjugation of the label with the antibody, the antibody is conjugated with a small hapten (e.g., digoxin) and one of the different types of labels mentioned above is conjugated with an anti-hapten antibody (e.g., anti-digoxin antibody). Thus, indirect conjugation of the label with the antibody can be achieved.

[0329] In other versions of immunoassay techniques, the antibody need not be labeled, and the presence thereof can be detected using a labeled antibody which binds to the antibody.

[0330] Thus, the diagnostic immunoassays herein may be in any assay format, including, for example, competitive binding assays, direct and indirect sandwich assays, and immunoprecipitation assays. Zola, Monoclonal Antibodies: A Manual of Techniques, pp. 147-158 (CRC Press, Inc. 1987).

[0331] Competitive binding assays rely on the ability of a labeled standard to compete with the test sample analyze for binding with a limited amount of antibody. The amount of antigen in the test sample is inversely proportional to the amount of standard that becomes bound to the antibodies. To facilitate determining the amount of standard that becomes bound, the antibodies generally are insolubilized before or after the competition, so that the standard and analyze that are bound to the antibodies may conveniently be separated from the standard and analyze which remain unbound.

[0332] Sandwich assays involve the use of two antibodies, each capable of binding to a different immunogenic portion, or epitope, of the protein to be detected. In a sandwich assay, the test sample analyze is bound by a first antibody which is immobilized on a solid support, and thereafter a second antibody binds to the analyze, thus forming an insoluble three-part complex. See, e.g., U.S. Pat. No. 4,376,110. The second antibody may itself be labeled with a detectable moiety (direct sandwich assays) or may be measured using an anti-immunoglobulin antibody that is labeled with a detectable moiety (indirect sandwich assay). For example, one type of sandwich assay is an ELISA assay, in which case the detectable moiety is an enzyme.

[0333] g. Proteomics

[0334] The term “proteome” is defined as the totality of the proteins present in a sample (e.g. tissue, organism, or cell culture) at a certain point of time. Proteomics includes, among other things, study of the global changes of protein expression in a sample (also referred to as “expression proteomics”). Proteomics typically includes the following steps: (1) separation of individual proteins in a sample by 2-D gel electrophoresis (2-D PAGE); (2) identification of the individual proteins recovered from the gel, e.g. my mass spectrometry or N-terminal sequencing, and (3) analysis of the data using bioinformatics. Proteomics methods are valuable supplements to other methods of gene expression profiling, and can be used, alone or in combination with other methods, to detect the products of the markers of the present invention.

[0335] h. 5′-Multiplexed Gene Specific Priming of Reverse Transcription

[0336] RT-PCR requires reverse transcription of the test RNA population as a first step. The most commonly used primer for reverse transcription is oligo-dT, which works well when RNA is intact. However, this primer will not be effective when RNA is highly fragmented.

[0337] The present invention includes the use of gene specific primers, which are roughly 20 bases in length with a Tm optimum between about 58° C. and 60° C. These primers will also serve as the reverse primers that drive PCR DNA amplification.

[0338] An alternative approach is based on the use of random hexamers as primers for cDNA synthesis. However, we have experimentally demonstrated that the method of using a multiplicity of gene-specific primers is superior over the known approach using random hexamers.

[0339] i. Promoter Methylation Analysis

[0340] A number of methods for quantization of RNA transcripts (gene expression analysis) or their protein translation products are discussed herein. The expression level of genes may also be inferred from information regarding chromatin structure, such as for example the methylation status of gene promoters and other regulatory elements and the acetylation status of histones.

[0341] In particular, the methylation status of a promoter influences the level of expression of the gene regulated by that promoter. Aberrant methylation of particular gene promoters has been implicated in expression regulation, such as for example silencing of tumor suppressor genes. Thus, examination of the methylation status of a gene's promoter can be utilized as a surrogate for direct quantization of RNA levels.

[0342] Several approaches for measuring the methylation status of particular DNA elements have been devised, including methylation-specific PCR (Herman J. G. et al. (1996) Methylation-specific PCR: a novel PCR assay for methylation status of CpG islands. Proc. Natl. Acad. Sci. USA. 93, 9821-9826) and bisulfite DNA sequencing (Frommer M. et al. (1992) A genomic sequencing protocol that yields a positive display of 5-methylcytosine residues in individual DNA strands. Proc. Natl. Acad. Sci. USA. 89, 1827-1831). More recently, microarray-based technologies have been used to characterize promoter methylation status (Chen C. M. (2003) Methylation target array for rapid analysis of CpG island hypermethylation in multiple tissue genomes. Am. J. Pathol. 163, 37-45).

[0343] j. Coexpression of Genes

[0344] A further aspect of the invention is the identification of gene expression clusters. Gene expression clusters can be identified by analysis of expression data using statistical analyses known in the art, including pairwise analysis of correlation based on Pearson correlation coefficients (Pearson K. and Lee A. (1902) Biometrika 2, 357).

[0345] In one embodiment, an expression cluster identified herein includes genes upregulated in the left colon (FIG. 1).

[0346] In another embodiment, an expression cluster identified herein includes genes upregulated in the right colon (FIG. 1).

[0347] In one other embodiment, an expression cluster identified herein includes genes upregulated in the terminal ileum (FIG. 1).

[0348] In other embodiments, the expression cluster identified herein includes genes in the IBD2 locus (Table 7); or in the IBDS locus (Table 8).

[0349] In some embodiments, the expression cluster identified herein includes genes classified under an immune response.

[0350] In other embodiments, the expression cluster identified herein includes genes classified under a response to wounding.

[0351] k. Design of Intron-Based PCR Primers and Probes

[0352] According to one aspect of the present invention, PCR primers and probes are designed based upon intron sequences present in the gene to be amplified. Accordingly, the first step in the primer/probe design is the delineation of intron sequences within the genes. This can be done by publicly available software, such as the DNA BLAT software developed by Kent, W. J., Genome Res. 12(4):656-64 (2002), or by the BLAST software including its variations. Subsequent steps follow well established methods of PCR primer and probe design.

[0353] In order to avoid non-specific signals, it is important to mask repetitive sequences within the introns when designing the primers and probes. This can be easily accomplished by using the Repeat Masker program available on-line through the Baylor College of Medicine, which screens DNA sequences against a library of repetitive elements and returns a query sequence in which the repetitive elements are masked. The masked intron sequences can then be used to design primer and probe sequences using any commercially or otherwise publicly available primer/probe design packages, such as Primer Express (Applied Biosystems); MGB assay-by-design (Applied Biosystems); Primer3 (Steve Rozen and Helen J. Skaletsky (2000) Primer3 on the WWW for general users and for biologist programmers. In: Krawetz S, Misener S (eds) Bioinformatics Methods and Protocols: Methods in Molecular Biology. Humana Press, Totowa, N.J., pp 365-386).

[0354] The most important factors considered in PCR primer design include primer length, melting temperature (Tm), and G/C content, specificity, complementary primer sequences, and 3′-end sequence. In general, optimal PCR primers are generally 17-30 bases in length, and contain about 20-80%, such as, for example, about 50-60% G+C bases. Tm's between 50 and 80° C., e.g. about 50 to 70° C. are typically preferred.

[0355] For further guidelines for PCR primer and probe design see, e.g. Dieffenbach, C. W. et al., “General Concepts for PCR Primer Design” in: PCR Primer, A Laboratory Manual, Cold Spring Harbor Laboratory Press, New York, 1995, pp. 133-155; Innis and Gelfand, “Optimization of PCRs” in: PCR Protocols, A Guide to Methods and Applications, CRC Press, London, 1994, pp. 5-11; and Plasterer, T. N. Primerselect: Primer and probe design. Methods Mol. Biol. 70:520-527 (1997), the entire disclosures of which are hereby expressly incorporated by reference.

[0356] l. IBD Gene Set, Assayed Gene Subsequences, and Clinical Application of Gene Expression Data

[0357] An important aspect of the present invention is to use the measured expression of certain genes by colonic issue to provide diagnostic information. For this purpose it is necessary to correct for (normalize away) both differences in the amount of RNA assayed and variability in the quality of the RNA used. Therefore, the assay typically measures and incorporates the expression of certain normalizing genes, including well known housekeeping genes, such as GAPDH and Cyp1. Alternatively, normalization can be based on the mean or median signal (Ct) of all of the assayed genes or a large subset thereof (global normalization approach). On a gene-by-gene basis, measured normalized amount of a patient colonic tissue mRNA is compared to the amount found in an appropriate tissue reference set. The number (N) of tissues in this reference set should be sufficiently high to ensure that different reference sets (as a whole) behave essentially the same way. If this condition is met, the identity of the individual colonic tissues present in a particular set will have no significant impact on the relative amounts of the genes assayed. Usually, the tissue reference set consists of at least about 30, preferably at least about 40 different IBD tissue specimens. Unless noted otherwise, normalized expression levels for each mRNA/tested tissue/patient will be expressed as a percentage of the expression level measured in the reference set. More specifically, the reference set of a sufficiently high number (e.g. 40) of IBD samples yields a distribution of normalized levels of each mRNA species. The level measured in a particular sample to be analyzed falls at some percentile within this range, which can be determined by methods well known in the art. Below, unless noted otherwise, reference to expression levels of a gene assume normalized expression relative to the reference set although this is not always explicitly stated.

[0358] m. Production of Antibodies

[0359] The present invention further provides anti-IBD marker antibodies. Exemplary antibodies include polyclonal, monoclonal, humanized, bispecific, and heteroconjugate antibodies. As discussed herein, the antibodies may be used in the diagnostic methods for IBD, and in some cases in methods of treatment of IBD.

[0360] (1) Polyclonal Antibodies

[0361] Polyclonal antibodies are preferably raised in animals by multiple subcutaneous (sc) or intraperitoneal (ip) injections of the relevant antigen and an adjuvant. It may be useful to conjugate the relevant antigen to a protein that is immunogenic in the species to be immunized, e.g., keyhole limpet hemocyanin, serum albumin, bovine thyroglobulin, or soybean trypsin inhibitor using a bifunctional or derivatizing agent, for example, maleimidobenzoyl sulfosuccinimide ester (conjugation through cysteine residues), N-hydroxysuccinimide (through lysine residues), glutaraldehyde, succinic anhydride, SOCl2, or R1N═C═NR, where R1 and R1 are different alkyl groups.

[0362] Animals are immunized against the antigen, immunogenic conjugates, or derivatives by combining, e.g., 100 μg or 5 μg of the protein or conjugate (for rabbits or mice, respectively) with 3 volumes of Freund's complete adjuvant and injecting the solution intradermally at multiple sites. One month later the animals are boosted with ⅕ to 1/10 the original amount of peptide or conjugate in Freund's complete adjuvant by subcutaneous injection at multiple sites. Seven to 14 days later the animals are bled and the serum is assayed for antibody titer. Animals are boosted until the titer plateaus. Preferably, the animal is boosted with the conjugate of the same antigen, but conjugated to a different protein and/or through a different cross-linking reagent. Conjugates also can be made in recombinant cell culture as protein fusions. Also, aggregating agents such as alum are suitably used to enhance the immune response.

[0363] (2) Monoclonal Antibodies

[0364] Various methods for making monoclonal antibodies herein are available in the art. For example, the monoclonal antibodies may be made using the hybridoma method first described by Kohler et al., Nature, 256:495 (1975), by recombinant DNA methods (U.S. Pat. No. 4,816,567).

[0365] In the hybridoma method, a mouse or other appropriate host animal, such as a hamster, is immunized as hereinabove described to elicit lymphocytes that produce or are capable of producing antibodies that will specifically bind to the protein used for immunization. Alternatively, lymphocytes may be immunized in vitro. Lymphocytes then are fused with myeloma cells using a suitable fusing agent, such as polyethylene glycol, to form a hybridoma cell (Goding, Monoclonal Antibodies: Principles and Practice, pp. 59-103 (Academic Press, 1986)).

[0366] The hybridoma cells thus prepared are seeded and grown in a suitable culture medium that preferably contains one or more substances that inhibit the growth or survival of the unfused, parental myeloma cells. For example, if the parental myeloma cells lack the enzyme hypoxanthine guanine phosphoribosyl transferase (HGPRT or HPRT), the culture medium for the hybridomas typically will include hypoxanthine, aminopterin, and thymidine (HAT medium), which substances prevent the growth of HGPRT-deficient cells.

[0367] Preferred myeloma cells are those that fuse efficiently, support stable high-level production of antibody by the selected antibody-producing cells, and are sensitive to a medium such as HAT medium. Among these, preferred myeloma cell lines are murine myeloma lines, such as those derived from MOPC-21 and MPC-11 mouse tumors available from the Salk Institute Cell Distribution Center, San Diego, Calif. USA, and SP-2 or X63-Ag8-653 cells available from the American Type Culture Collection, Rockville, Md. USA. Human myeloma and mouse-human heteromyeloma cell lines also have been described for the production of human monoclonal antibodies (Kozbor, J. Immunol., 133:3001 (1984); and Brodeur et al., Monoclonal Antibody Production Techniques and Applications, pp. 51-63 (Marcel Dekker, Inc., New York, 1987)).

[0368] Culture medium in which hybridoma cells are growing is assayed for production of monoclonal antibodies directed against the antigen. Preferably, the binding specificity of monoclonal antibodies produced by hybridoma cells is determined by immunoprecipitation or by an in vitro binding assay, such as radioimmunoassay (RIA) or enzyme-linked immunoabsorbent assay (ELISA).

[0369] The binding affinity of the monoclonal antibody can, for example, be determined by the Scatchard analysis of Munson et al., Anal. Biochem., 107:220 (1980).

[0370] After hybridoma cells are identified that produce antibodies of the desired specificity, affinity, and/or activity, the clones may be subcloned by limiting dilution procedures and grown by standard methods (Goding, Monoclonal Antibodies: Principles and Practice, pp. 59-103 (Academic Press, 1986)). Suitable culture media for this purpose include, for example, D-MEM or RPMI-1640 medium. In addition, the hybridoma cells may be grown in vivo as ascites tumors in an animal.

[0371] The monoclonal antibodies secreted by the subclones are suitably separated from the culture medium, ascites fluid, or serum by conventional antibody purification procedures such as, for example, protein A-Sepharose, hydroxylapatite chromatography, gel electrophoresis, dialysis, or affinity chromatography.

[0372] DNA encoding the monoclonal antibodies is readily isolated and sequenced using conventional procedures (e.g., by using oligonucleotide probes that are capable of binding specifically to genes encoding the heavy and light chains of murine antibodies). The hybridoma cells serve as a preferred source of such DNA. Once isolated, the DNA may be placed into expression vectors, which are then transfected into host cells such as E. coli cells, simian COS cells, Chinese Hamster Ovary (CHO) cells, or myeloma cells that do not otherwise produce antibody protein, to obtain the synthesis of monoclonal antibodies in the recombinant host cells. Review articles on recombinant expression in bacteria of DNA encoding the antibody include Skerra et al., Curr. Opinion in Immunol., 5:256-262 (1993) and Plückthun, Immunol Revs., 130:151-188 (1992).

[0373] In a further embodiment, monoclonal antibodies or antibody fragments can be isolated from antibody phage libraries generated using the techniques described in McCafferty et al., Nature, 348:552-554 (1990). Clackson et al., Nature, 352:624-628 (1991) and Marks et al., J. Mol. Biol., 222:581-597 (1991) describe the isolation of murine and human antibodies, respectively, using phage libraries. Subsequent publications describe the production of high affinity (nM range) human antibodies by chain shuffling (Marks et al., Bio/Technology, 10:779-783 (1992)), as well as combinatorial infection and in vivo recombination as a strategy for constructing very large phage libraries (Waterhouse et al., Nuc. Acids. Res., 21:2265-2266 (1993)). Thus, these techniques are viable alternatives to traditional monoclonal antibody hybridoma techniques for isolation of monoclonal antibodies.

[0374] The DNA also may be modified, for example, by substituting the coding sequence for human heavy chain and light chain constant domains in place of the homologous murine sequences (U.S. Pat. No. 4,816,567; and Morrison, et al., Proc. Natl. Acad. Sci. USA, 81:6851 (1984)), or by covalently joining to the immunoglobulin coding sequence all or part of the coding sequence for a non-immunoglobulin polypeptide.

[0375] Typically such non-immunoglobulin polypeptides are substituted for the constant domains of an antibody, or they are substituted for the variable domains of one antigen-combining site of an antibody to create a chimeric bivalent antibody comprising one antigen-combining site having specificity for an antigen and another antigen-combining site having specificity for a different antigen.

[0376] (3) Humanized Antibodies

[0377] Methods for humanizing non-human antibodies have been described in the art. Preferably, a humanized antibody has one or more amino acid residues introduced into it from a source which is non-human. These non-human amino acid residues are often referred to as “import” residues, which are typically taken from an “import” variable domain. Humanization can be essentially performed following the method of Winter and co-workers (Jones et al., Nature, 321:522-525 (1986); Riechmann et al., Nature, 332:323-327 (1988); Verhoeyen et al., Science, 239:1534-1536 (1988)), by substituting hypervariable region sequences for the corresponding sequences of a human antibody. Accordingly, such “humanized” antibodies are chimeric antibodies (U.S. Pat. No. 4,816,567) wherein substantially less than an intact human variable domain has been substituted by the corresponding sequence from a non-human species. In practice, humanized antibodies are typically human antibodies in which some hypervariable region residues and possibly some FR residues are substituted by residues from analogous sites in rodent antibodies. An example of a humanized antibody used to treat IBD is infliximab (Remicade®), an engineered murine-human chimeric monoclonal antibody. The antibody binds the cytokine TNF-alpha and prevents it from binding its receptors to trigger and sustain an inflammatory response. Infliximab is used to treat both CD and UC.

[0378] The choice of human variable domains, both light and heavy, to be used in making the humanized antibodies is very important to reduce antigenicity. According to the so-called “best-fit” method, the sequence of the variable domain of a rodent antibody is screened against the entire library of known human variable-domain sequences. The human sequence which is closest to that of the rodent is then accepted as the human framework region (FR) for the humanized antibody (Sims et al., J. Immunol., 151:2296 (1993); Chothia et al., J. Mol. Biol., 196:901 (1987)). Another method uses a particular framework region derived from the consensus sequence of all human antibodies of a particular subgroup of light or heavy chains. The same framework may be used for several different humanized antibodies (Carter et al., Proc. Natl. Acad. Sci. USA, 89:4285 (1992); Presta et al., J. Immunol., 151:2623 (1993)).

[0379] It is further important that antibodies be humanized with retention of high affinity for the antigen and other favorable biological properties. To achieve this goal, according to a preferred method, humanized antibodies are prepared by a process of analysis of the parental sequences and various conceptual humanized products using three-dimensional models of the parental and humanized sequences. Three-dimensional immunoglobulin models are commonly available and are familiar to those skilled in the art. Computer programs are available which illustrate and display probable three-dimensional conformational structures of selected candidate immunoglobulin sequences. Inspection of these displays permits analysis of the likely role of the residues in the functioning of the candidate immunoglobulin sequence, i.e., the analysis of residues that influence the ability of the candidate immunoglobulin to bind its antigen. In this way, FR residues can be selected and combined from the recipient and import sequences so that the desired antibody characteristic, such as increased affinity for the target antigen(s), is achieved. In general, the hypervariable region residues are directly and most substantially involved in influencing antigen binding.

[0380] Various forms of the humanized antibody are contemplated. For example, the humanized antibody may be an antibody fragment, such as a Fab, which is optionally conjugated with one or more cytotoxic agent(s) in order to generate an immunoconjugate. Alternatively, the humanized antibody may be an intact antibody, such as an intact IgG1 antibody.

[0381] (4) Human Antibodies

[0382] As an alternative to humanization, human antibodies can be generated. For example, it is now possible to produce transgenic animals (e.g., mice) that are capable, upon immunization, of producing a full repertoire of human antibodies in the absence of endogenous immunoglobulin production. For example, it has been described that the homozygous deletion of the antibody heavy-chain joining region (JH) gene in chimeric and germ-line mutant mice results in complete inhibition of endogenous antibody production. Transfer of the human germ-line immunoglobulin gene array in such germ-line mutant mice will result in the production of human antibodies upon antigen challenge. See, e.g., Jakobovits et al., Proc. Natl. Acad. Sci. USA, 90:2551 (1993); Jakobovits et al., Nature, 362:255-258 (1993); Bruggermann et al., Year in Immuno., 7:33 (1993); and U.S. Pat. Nos. 5,591,669, 5,589,369 and 5,545,807. Alternatively, phage display technology (McCafferty et al., Nature 348:552-553 (1990)) can be used to produce human antibodies and antibody fragments in vitro, from immunoglobulin variable (V) domain gene repertoires from unimmunized donors. According to this technique, antibody V domain genes are cloned in-frame into either a major or minor coat protein gene of a filamentous bacteriophage, such as M13 or fd, and displayed as functional antibody fragments on the surface of the phage particle. Because the filamentous particle contains a single-stranded DNA copy of the phage genome, selections based on the functional properties of the antibody also result in selection of the gene encoding the antibody exhibiting those properties. Thus, the phage mimics some of the properties of the B-cell. Phage display can be performed in a variety of formats; for their review see, e.g., Johnson, Kevin S, and Chiswell, David J., Current Opinion in Structural Biology 3:564-571 (1993). Several sources of V-gene segments can be used for phage display. Clackson et al., Nature, 352:624-628 (1991) isolated a diverse array of anti-oxazolone antibodies from a small random combinatorial library of V genes derived from the spleens of immunized mice. A repertoire of V genes from unimmunized human donors can be constructed and antibodies to a diverse array of antigens (including self-antigens) can be isolated essentially following the techniques described by Marks et al., J. Mol. Biol. 222:581-597 (1991), or Griffith et al., EMBO J. 12:725-734 (1993). See, also, U.S. Pat. Nos. 5,565,332 and 5,573,905.

[0383] As discussed above, human antibodies may also be generated by in vitro activated B cells (see U.S. Pat. Nos. 5,567,610 and 5,229,275).

[0384] (5) Antibody Fragments

[0385] Various techniques have been developed for the production of antibody fragments comprising one or more antigen binding regions. Traditionally, these fragments were derived via proteolytic digestion of intact antibodies (see, e.g., Morimoto et al., Journal of Biochemical and Biophysical Methods 24:107-117 (1992); and Brennan et al., Science, 229:81 (1985)). However, these fragments can now be produced directly by recombinant host cells. For example, the antibody fragments can be isolated from the antibody phage libraries discussed above. Alternatively, Fab′-SH fragments can be directly recovered from E. coli and chemically coupled to form F(ab′)2 fragments (Carter et al., Bio/Technology 10:163-167 (1992)). According to another approach, F(ab′)2 fragments can be isolated directly from recombinant host cell culture. Other techniques for the production of antibody fragments will be apparent to the skilled practitioner. In other embodiments, the antibody of choice is a single chain FIT fragment (scFv). See WO 93/16185; U.S. Pat. No. 5,571,894; and U.S. Pat. No. 5,587,458. The antibody fragment may also be a Alinear antibody@, e.g., as described in U.S. Pat. No. 5,641,870 for example. Such linear antibody fragments may be monospecific or bispecific.

[0386] (6) Bispecific Antibodies

[0387] Bispecific antibodies are antibodies that have binding specificities for at least two different epitopes. Exemplary bispecific antibodies may bind to two different epitopes of an IBD marker protein. Bispecific antibodies may also be used to localize agents to cells which express an IBD marker protein.

[0388] These antibodies possess an IBD marker-binding arm and an arm which binds an agent (e.g. an aminosalicylate). Bispecific antibodies can be prepared as full length antibodies or antibody fragments (e.g. F(ab′)2 bispecific antibodies).

[0389] Methods for making bispecific antibodies are known in the art. Traditional production of full length bispecific antibodies is based on the coexpression of two immunoglobulin heavy chain-light chain pairs, where the two chains have different specificities (Millstein et al., Nature, 305:537-539 (1983)). Because of the random assortment of immunoglobulin heavy and light chains, these hybridomas (quadromas) produce a potential mixture of 10 different antibody molecules, of which only one has the correct bispecific structure. Purification of the correct molecule, which is usually done by affinity chromatography steps, is rather cumbersome, and the product yields are low. Similar procedures are disclosed in WO 93/08829, and in Traunecker et al., EMBO J., 10:3655-3659 (1991).

[0390] According to a different approach, antibody variable domains with the desired binding specificities (antibody-antigen combining sites) are fused to immunoglobulin constant domain sequences. The fusion preferably is with an immunoglobulin heavy chain constant domain, comprising at least part of the hinge, CH2, and CH3 regions. It is preferred to have the first heavy-chain constant region (CH1) containing the site necessary for light chain binding, present in at least one of the fusions. DNAs encoding the immunoglobulin heavy chain fusions and, if desired, the immunoglobulin light chain, are inserted into separate expression vectors, and are co-transfected into a suitable host organism. This provides for great flexibility in adjusting the mutual proportions of the three polypeptide fragments in embodiments when unequal ratios of the three polypeptide chains used in the construction provide the optimum yields. It is, however, possible to insert the coding sequences for two or all three polypeptide chains in one expression vector when the expression of at least two polypeptide chains in equal ratios results in high yields or when the ratios are of no particular significance.

[0391] In a preferred embodiment of this approach, the bispecific antibodies are composed of a hybrid immunoglobulin heavy chain with a first binding specificity in one arm, and a hybrid immunoglobulin heavy chain-light chain pair (providing a second binding specificity) in the other arm. It was found that this asymmetric structure facilitates the separation of the desired bispecific compound from unwanted immunoglobulin chain combinations, as the presence of an immunoglobulin light chain in only one half of the bispecific molecule provides for a facile way of separation. This approach is disclosed in WO 94/04690. For further details of generating bispecific antibodies see, for example, Suresh et al., Methods in Enzymology, 121:210 (1986).

[0392] According to another approach described in U.S. Pat. No. 5,731,168, the interface between a pair of antibody molecules can be engineered to maximize the percentage of heterodimers which are recovered from recombinant cell culture. The preferred interface comprises at least a part of the C_{H}3 domain of an antibody constant domain. In this method, one or more small amino acid side chains from the interface of the first antibody molecule are replaced with larger side chains (e.g. tyrosine or tryptophan). Compensatory “cavities” of identical or similar size to the large side chain(s) are created on the interface of the second antibody molecule by replacing large amino acid side chains with smaller ones (e.g. alanine or threonine). This provides a mechanism for increasing the yield of the heterodimer over other unwanted end-products such as homodimers.

[0393] Bispecific antibodies include cross-linked or “heteroconjugate” antibodies. For example, one of the antibodies in the heteroconjugate can be coupled to avidin, the other to biotin. Such antibodies have, for example, been proposed to target immune system cells to unwanted cells (U.S. Pat. No. 4,676,980), and for treatment of HIV infection (WO 91/00360, WO 92/200373, and EP 03089). Heteroconjugate antibodies may be made using any convenient cross-linking methods. Suitable cross-linking agents are well known in the art, and are disclosed in U.S. Pat. No. 4,676,980, along with a number of cross-linking techniques.

[0394] Techniques for generating bispecific antibodies from antibody fragments have also been described in the literature. For example, bispecific antibodies can be prepared using chemical linkage. Brennan et al., Science, 229: 81 (1985) describe a procedure wherein intact antibodies are proteolytically cleaved to generate F(ab′)₂ fragments. These fragments are reduced in the presence of the dithiol complexing agent sodium arsenite to stabilize vicinal dithiols and prevent intermolecular disulfide formation. The Fab′ fragments generated are then converted to thionitrobenzoate (TNB) derivatives. One of the Fab′-TNB derivatives is then reconverted to the Fab′-thiol by reduction with mercaptoethylamine and is mixed with an equimolar amount of the other Fab′-TNB derivative to form the bispecific antibody. The bispecific antibodies produced can be used as agents for the selective immobilization of enzymes.

[0395] Various techniques for making and isolating bispecific antibody fragments directly from recombinant cell culture have also been described. For example, bispecific antibodies have been produced using leucine zippers. Kostelny et al., J. Immunol., 148(5):1547-1553 (1992). The leucine zipper peptides from the Fos and Jun proteins were linked to the Fab′ portions of two different antibodies by gene fusion. The antibody homodimers were reduced at the hinge region to form monomers and then re-oxidized to form the antibody heterodimers. This method can also be utilized for the production of antibody homodimers. The “diabody” technology described by Hollinger et al., Proc. Natl. Acad. Sci. USA, 90:6444-6448 (1993) has provided an alternative mechanism for making bispecific antibody fragments. The fragments comprise a heavy-chain variable domain (V_{H}) connected to a light-chain variable domain (V_{L}) by a linker which is too short to allow pairing between the two domains on the same chain. Accordingly, the V_{H} and V_{L} domains of one fragment are forced to pair with the complementary V_{L} and V_{H} domains of another fragment, thereby forming two antigen-binding sites. Another strategy for making bispecific antibody fragments by the use of single-chain Fv (sFv) dimers has also been reported. See Gruber et al., J. Immunol., 152:5368 (1994).

[0396] Antibodies with more than two valencies are contemplated. For example, trispecific antibodies can be prepared. Tuft et al. J. Immunol. 147: 60 (1991).

[0397] (7) Other Amino Acid Sequence Modifications

[0398] Amino acid sequence modification(s) of the antibodies described herein are contemplated. For example, it may be desirable to improve the binding affinity and/or other biological properties of the antibody. Amino acid sequence variants of the antibody are prepared by introducing appropriate nucleotide changes into the antibody nucleic acid, or by peptide synthesis. Such modifications include, for example, deletions from, and/or insertions into and/or substitutions of, residues within the amino acid sequences of the antibody. Any combination of deletion, insertion, and substitution is made to arrive at the final construct, provided that the final construct possesses the desired characteristics. The amino acid changes also may alter post-translational processes of the antibody, such as changing the number or position of glycosylation sites.

[0399] A useful method for identification of certain residues or regions of the antibody that are preferred locations for mutagenesis is called “alanine scanning mutagenesis” as described by Cunningham and Wells Science, 244:1081-1085 (1989). Here, a residue or group of target residues are identified (e.g., charged residues such as arg, asp, his, lys, and glu) and replaced by a neutral or negatively charged amino acid (most preferably alanine or polyalanine) to affect the interaction of the amino acids with antigen. Those amino acid locations demonstrating functional sensitivity to the substitutions then are refined by introducing further or other variants at, or for, the sites of substitution. Thus, while the site for introducing an amino acid sequence variation is predetermined, the nature of the mutation per se need not be predetermined. For example, to analyze the performance of a mutation at a given site, ala scanning or random mutagenesis is conducted at the target codon or region and the expressed antibody variants are screened for the desired activity.

[0400] Amino acid sequence insertions include amino- and/or carboxyl-terminal fusions ranging in length from one residue to polypeptides containing a hundred or more residues, as well as intrasequence insertions of single or multiple amino acid residues. Examples of terminal insertions include antibody with an N-terminal methionyl residue or the antibody fused to a cytotoxic polypeptide. Other insertional variants of the antibody molecule include the fusion to the N- or C-terminus of the antibody to an enzyme (e.g. for ADEPT) or a polypeptide which increases the serum half-life of the antibody.

[0401] Another type of variant is an amino acid substitution variant. These variants have at least one amino acid residue in the antibody molecule replaced by a different residue. The sites of greatest interest for substitutional mutagenesis include the hypervariable regions, but FR alterations are also contemplated. Conservative substitutions are shown in Table 1 under the heading of “preferred substitutions”. If such substitutions result in a change in biological activity, then more substantial changes, denominated “exemplary substitutions” in the following table, or as further described below in reference to amino acid classes, may be introduced and the products screened.

| Original | Exemplary | Preferred |
|---|---|---|
| Residue | Substitutions | Substitutions |
| Ala (A) | val; leu; ile | val |
| Arg (R) | lys; gln; asn | lys |
| Asn (N) | gln; his; lys; arg | gln |
| Asp (D) | glu | glu |
| Cys (C) | ser | ser |
| Gln (Q) | asn | asn |
| Glu (E) | asp | asp |
| Gly (G) | pro; ala | ala |
| His (H) | asn; gln; lys; arg | arg |
| Ile (I) | leu; val; met; ala; phe; | leu |
| | norleucine | |
| Leu (L) | norleucine; ile; val; met; ala; | ile |
| | phe | |
| Lys (K) | arg; gln; asn | arg |
| Met (M) | leu; phe; ile | leu |
| Phe (F) | leu; val; ile; ala; tyr | leu |
| Pro (P) | ala | ala |
| Ser (S) | thr | thr |
| Thr (T) | ser | ser |
| Trp (W) | tyr; phe | tyr |
| Tyr (Y) | trp; phe; thr; ser | phe |
| Val (V) | ile; leu; met; phe; ala; | leu |
| | norleucine | |

[0402] Substantial modifications in the biological properties of the antibody are accomplished by selecting substitutions that differ significantly in their effect on maintaining (a) the structure of the polypeptide backbone in the area of the substitution, for example, as a sheet or helical conformation, (b) the charge or hydrophobicity of the molecule at the target site, or (c) the bulk of the side chain. Amino acids may be grouped according to similarities in the properties of their side chains (in A. L. Lehninger, in Biochemistry, second ed., pp. 73-75, Worth Publishers, New York (1975)): non-polar: Ala (A), Val (V), Leu (L), Ile (I), Pro (P), Phe (F), Trp (W), Met (M); uncharged polar: Gly (G), Ser (S), Thr (T), Cys (C), Tyr (Y), Asn (N), Gln (O); acidic: Asp (D), Glu (E); and basic: Lys (K), Arg (R), His (H).

[0403] Alternatively, naturally occurring residues may be divided into groups based on common side-chain properties: hydrophobic: Norleucine, Met, Ala, Val, Leu, Ile; neutral hydrophilic: Cys, Ser, Thr, Asn, Gln; acidic: Asp, Glu; basic: H is, Lys, Arg; residues that influence chain orientation: Gly, Pro; and aromatic: Trp, Tyr, Phe.

[0404] Non-conservative substitutions will entail exchanging a member of one of these classes for another class.

[0405] Any cysteine residue not involved in maintaining the proper conformation of the antibody also may be substituted, generally with serine, to improve the oxidative stability of the molecule and prevent aberrant crosslinking. Conversely, cysteine bond(s) may be added to the antibody to improve its stability (particularly where the antibody is an antibody fragment such as an Fv fragment).

[0406] A particularly preferred type of substitutional variant involves substituting one or more hypervariable region residues of a parent antibody (e.g. a humanized or human antibody). Generally, the resulting variant(s) selected for further development will have improved biological properties relative to the parent antibody from which they are generated. A convenient way for generating such substitutional variants involves affinity maturation using phage display. Briefly, several hypervariable region sites (e.g. 6-7 sites) are mutated to generate all possible amino substitutions at each site. The antibody variants thus generated are displayed in a monovalent fashion from filamentous phage particles as fusions to the gene III product of M13 packaged within each particle. The phage-displayed variants are then screened for their biological activity (e.g. binding affinity) as herein disclosed. In order to identify candidate hypervariable region sites for modification, alanine scanning mutagenesis can be performed to identify hypervariable region residues contributing significantly to antigen binding. Alternatively, or additionally, it may be beneficial to analyze a crystal structure of the antigen-antibody complex to identify contact points between the antibody and an IBD marker protein. Such contact residues and neighboring residues are candidates for substitution according to the techniques elaborated herein. Once such variants are generated, the panel of variants is subjected to screening as described herein and antibodies with superior properties in one or more relevant assays may be selected for further development.

[0407] Engineered antibodies with three or more (preferably four) functional antigen binding sites are also contemplated (U.S. Published Patent Application No. US2002/0004587 A1, Miller et al.).

[0408] Nucleic acid molecules encoding amino acid sequence variants of the antibody are prepared by a variety of methods known in the art. These methods include, but are not limited to, isolation from a natural source (in the case of naturally occurring amino acid sequence variants) or preparation by oligonucleotide-mediated (or site-directed) mutagenesis, PCR mutagenesis, and cassette mutagenesis of an earlier prepared variant or a non-variant version of the antibody.

### B.3 KITS OF THE INVENTION

[0409] The materials for use in the methods of the present invention are suited for preparation of kits produced in accordance with well known procedures. The invention thus provides kits comprising agents, which may include gene-specific or gene-selective probes and/or primers, for quantitating the expression of the disclosed genes for IBD. Such kits may optionally contain reagents for the extraction of RNA from samples, in particular fixed paraffin-embedded tissue samples and/or reagents for RNA amplification. In addition, the kits may optionally comprise the reagent(s) with an identifying description or label or instructions relating to their use in the methods of the present invention. The kits may comprise containers (including microtiter plates suitable for use in an automated implementation of the method), each with one or more of the various reagents (typically in concentrated form) utilized in the methods, including, for example, pre-fabricated microarrays, buffers, the appropriate nucleotide triphosphates (e.g., dATP, dCTP, dGTP and dTTP; or rATP, rCTP, rGTP and UTP), reverse transcriptase, DNA polymerase, RNA polymerase, and one or more probes and primers of the present invention (e.g., appropriate length poly(T) or random primers linked to a promoter reactive with the RNA polymerase).

### B.4 REPORTS OF THE INVENTION

[0410] The methods of this invention, when practiced for commercial diagnostic purposes generally produce a report or summary of the normalized expression levels of one or more of the selected genes. The methods of this invention will produce a report comprising a prediction of the clinical outcome of a subject diagnosed with an IBD before and after any surgical procedure to treat the IBD. The methods and reports of this invention can further include storing the report in a database. Alternatively, the method can further create a record in a database for the subject and populate the record with data. In one embodiment the report is a paper report, in another embodiment the report is an auditory report, in another embodiment the report is an electronic record. It is contemplated that the report is provided to a physician and/or the patient. The receiving of the report can further include establishing a network connection to a server computer that includes the data and report and requesting the data and report from the server computer.

[0411] The methods provided by the present invention may also be automated in whole or in part.

[0412] All aspects of the present invention may also be practiced such that a limited number of additional genes that are co-expressed with the disclosed genes, for example as evidenced by high Pearson correlation coefficients, are included in a prognostic or predictive test in addition to and/or in place of disclosed genes.

[0413] Having described the invention, the same will be more readily understood through reference to the following Examples, which is provided by way of illustration, and is not intended to limit the invention in any way.

### EXAMPLES

### Example 1

### Microarray Analysis

[0414] Clinically, IBD is characterized by diverse manifestations often resulting in a chronic, unpredictable course. Bloody diarrhea and abdominal pain are often accompanied by fever and weight loss. Anemia is common, as is severe fatigue. Joint manifestations ranging from arthralgia to acute arthritis as well as abnormalities in liver function are commonly associated with IBD. Patients with IBD also have an increased risk of colon carcinomas compared to the general population. During acute “attacks” of IBD, work and other normal activity are usually impossible, and often a patient is hospitalized.

[0415] Although the cause of IBD remains unknown, several factors such as genetic, infectious and immunologic susceptibility have been implicated. IBD is much more common in Caucasians, especially those of Jewish descent. The chronic inflammatory nature of the condition has prompted an intense search for a possible infectious cause. Although agents have been found which stimulate acute inflammation, none has been found to cause the chronic inflammation associated with IBD. The hypothesis that IBD is an autoimmune disease is supported by the previously mentioned extraintestinal manifestation of IBD as joint arthritis, and the known positive response to IBD by treatment with therapeutic agents such as adrenal glucocorticoids, cyclosporine and azathioprine, which are known to suppress immune response. In addition, the GI tract, more than any other organ of the body, is continuously exposed to potential antigenic substances such as proteins from food, bacterial byproducts (LPS), etc. The subtypes of IBD are UC and CD.

[0416] CD differs from UC in that the inflammation extends through all layers of the intestinal wall and involves mesentery as well as lymph nodes. CD may affect any part of the alimentary canal from mouth to anus. The disease is often discontinuous, i.e., severely diseased segments of bowel are separated from apparently disease-free areas. In CD, the bowel wall also thickens which can lead to obstructions. In addition, fistulas and fissures are not uncommon.

[0417] Both UC and CD are typically diagnosed by endoscopy, which shows the afflicted areas. However, the use of microarray technology has shed light on the molecular pathology of UC. A study published in 2000 used microarray technology to analyze eight UC patients. (Dieckgraefe et al., Physiol. Genomics 2000; 4:1-11). 6500 genes were analyzed in this study and the results confirmed increased expression of genes previously implicated in UC pathogenesis, namely IL-1, IL-IRA and IL-8. Endoscopic diagnosis coupled with the ability to take pinch mucosal biopsies have allowed investigators to further diagnose UC using microarray analysis, and allowed investigators to analyze afflicted tissue against normal tissue and to analyze tissue from a larger range of patients with varying degrees of severity. Biopsies of macroscopically unaffected areas of the colon and terminal ileum were microarrayed. (Langman et al., Gastroent. 2004; 127:26-40). Langman analyzed 22,283 genes and found that genes involved in cellular detoxification, such as pregnane X receptor and MDR1 were significantly downregulated in the colon of patients with UC, but there was no change in expression of these genes in CD patients.

[0418] Nucleic acid microarrays, often containing thousands of gene sequences, are useful for identifying differentially expressed genes in diseased tissues as compared to their normal counterparts. Using nucleic acid microarrays, test and control mRNA samples from test and control tissue samples are reverse transcribed and labeled to generate cDNA probes. The cDNA probes are then hybridized to an array of nucleic acids immobilized on a solid support. The array is configured such that the sequence and position of each member of the array is known. For example, a selection of genes known to be expressed in certain disease states may be arrayed on a solid support. Hybridization of a labeled probe with a particular array member indicates that the sample from which the probe was derived expresses that gene. If the hybridization signal of a probe from a test (for example, disease tissue) sample is greater than hybridization signal of a probe from a control, normal tissue sample, the gene or genes overexpressed in the disease tissue are identified. The implication of this result is that an overexpressed protein in a disease tissue is useful not only as a diagnostic marker for the presence of the disease condition, but also as a therapeutic target for treatment of the disease condition.

[0419] The methodology of hybridization of nucleic acids and microarray technology is well known in the art. In one example, the specific preparation of nucleic acids for hybridization and probes, slides, and hybridization conditions are all detailed in PCT Patent Application Serial No. PCT/US01/10482, filed on Mar. 30, 2001 and which is herein incorporated by reference.

[0420] Microarray analysis was used to find genes that are overexpressed in CD as compared to normal bowel tissue. For this study, sixty seven patients with CD and thirty-one control patients undergoing colonoscopy were recruited. Patient symptoms were evaluated at the time of colonoscopy using the simple clinical colitis activity index (SCCAI). (Walmsley et al., Gut. 1998; 43:29-32). Quiescent disease showing no histological inflammation was defined as a SCCAI of 2 or less. Active disease with histologially acute or chronic inflammation was defined as a SCCAI of greater than 2. The severity of the CD itself was determined by the criteria of Leonard-Jones. (Lennard-Jones Scand. J. Gastroent. 1989; 170:2-6). The CD patients provided well phenotyped biopsies for analysis of inflammatory pathways of CD at the molecular level, thus identifying novel candidate genes and potential pathways for therapeutic intervention. Paired biopsies were taken from each anatomical location.

[0421] All biopsies were stored at −70° C. until ready for RNA isolation. The biopsies were homogenized in 600 μl of RLT buffer (+BME) and RNA was isolated using Qiagen™ Rneasy Mini columns (Qiagen) with on-column DNase treatment following the manufacturer's guidelines. Following RNA isolation, RNA was quantitated using RiboGreen™ (Molecular Probes) following the manufacturer's guidelines and checked on agarose gels for integrity. Appropriate amounts of RNA were labeled for microarray analysis and samples were run on proprietary Genentech microarray and Affymetrics™ microarrays. Genes were compared whose expression was upregulated in UC tissue vs normal bowel, matching biopsies from normal bowel and CD tissue from the same patient. The results of this experiment showed that the nucleic acids as shown in Tables 1A, 1B, and 2A (provided above) are differentially expressed in CD and/or UC tissue in comparison to normal tissue.

[0422] The genes listed in Table 1A-1B demonstrated a minimum 1.5 fold difference in expression and also acceptable probe hybridization strength was observed. The genes listed in Table 2 were found to have a minimum within-group Pearson correlation of approximately 0.65 and a three-fold upregulation of gene expression was observed.

[0423] More specifically, the SEQ ID NOS listed in Tables 1A and 2 represent polynucleotides and their encoded polypeptide which are significantly up-regulated/overexpressed in CD and/or UC.

[0424] The SEQ ID NO listed in Table 1B represents a polynucleotide and its encoded polypeptide which is significantly down-regulated/under-expressed in CD and/or UC.

[0425] SEQ ID NOS: listed in Table 3A represent polynucleotides and their encoded polypeptide which are significantly up-regulated/overexpressed in UC.

[0426] SEQ ID NOS: listed in Table 3B represent polynucleotides and their encoded polypeptide which are significantly down-regulated/underexpressed in UC.

### Example 2

### Characterisation of Distinct Intestinal Gene Expression Profiles in Ulcerative Colitis by Microarray Analysis

[0427] Microarray analysis allows a comprehensive picture of gene expression at the cellular level. The aim of this study was to investigate differential intestinal gene expression in patients with ulcerative colitis (UC) and controls.

[0428] Methods: 67 UC and 31 control subjects-23 normal and 8 inflamed non-inflammatory bowel disease patients were studied. Paired endoscopic biopsies were taken from 5 specific anatomical locations for RNA extraction and histology. 41058 expression sequence tags were analyzed in 215 biopsies using the Agilent platform. Confirmation of results was undertaken by real time PCR and immunohistochemistry. Results: In healthy control biopsies, cluster analysis showed differences in gene expression between the right and left colon. (χ²=25.1, p<0.0001). Developmental genes HOXA13, (p=2.3×10⁻¹⁶), HOXB13 (p<1×10⁻⁴⁵), GLI1 (p=4.0×10⁻²⁴), and GLI3 (p=2.1×10⁻²⁸) primarily drove this separation. When all UC biopsies and control biopsies were compared, 143 sequences had a fold change of >1.5 in the UC biopsies (0.01>p>10⁻⁴⁵) and 54 sequences had a fold change of <−1.5 (0.01>p>10⁻²⁰). Differentially upregulated in UC genes included SAA1 (p<10⁻⁴⁵) the alpha defensins, DEFAS&6 (p=0.00003 and p=6.95×10⁻⁷ respectively), MMP3 (p=5.6×10⁻¹⁰) and MMP7 (p=2.3×10⁻⁷). Increased DEFAS&6 expression was further characterized to Paneth cell metaplasia by immunohistochemistry and in-situ hybridization. Sub-analysis of the IBD2 & IBDS loci, and the ABC transporter genes revealed a number of differentially regulated genes in the UC biopsies. Conclusions: These data implicate a number of novel gene families, as well as established candidate genes in the pathogenesis of UC, and may allow characterisation of potential therapeutic targets.

[0429] The aim of the current study was to use microarray gene expression analysis to investigate genome wide expression in endoscopic mucosal biopsies of patients with UC and controls. In order to resolve previous inconsistencies and to further delineate inflammatory pathways in UC, substantially more patients and biopsies were included than in previous studies.

[0430] Materials and Methods

[0431] Patients and Controls. Sixty seven patients with UC and 31 control patients who were undergoing colonoscopy were recruited. Their demographics are shown in Table 4.

TABLE 4

| | UC |
|---|---|
| Number of patients | 67 |
| Male/Female | 33/34 |
| Median age at diagnosis (years) | 37 |
| Median duration of follow up (years) | 7.8 |
| Disease Group | |
| New Diagnosis (1) | 8 |
| Quiescent disease (2) | 41 |
| Active disease (3) | 18 |
| Disease extent at time of Endoscopy | |
| Proctitis | 15 |
| L sided colitis | 27 |
| Extensive colitis | 25 |
| Current Smoker | 6 |
| Family history of IBD | 5 |
| 5 ASA Therapy | 40 |
| Corticosteroid therapy | 10 |
| Immunosuppressant therapy (AZA, 6MP, MTX, MMF) | 11 |

[0432] Sixty seven patients with UC and 31 control patients who were undergoing colonoscopy were recruited (Table 4). All UC patients attended the clinic at the Western General Hospital, Edinburgh and the diagnosis of UC adhered to the criteria of Lennard-Jones. (Lennard-Jones J E. Scand J Gastroenterol Suppl 1989; 170:2-6) Phenotypic data were collected by interview and case-note review and comprised of demographics, date of diagnosis, disease location, disease behavior, progression, extra-intestinal manifestations, surgical operations, current medication, smoking history, joint symptoms, family history and ethnicity. At the time of colonoscopy patients symptoms were evaluated using the simple clinical colitis activity index (SCCAI). (Walmsley et. al. Gut. 1998; 43:29-32)

[0433] Patients were recorded as having a ‘new diagnosis’ of UC if the colonoscopy took place at the time of their index presentation and they had had less than 24 hours of oral/IV therapy. Quiescent disease was defined as a SCCAI of 2 or less and histology showing no inflammation or mild chronic inflammation and active disease was defined as a SCCAI of greater than 2 and histology showing acute or chronic inflammation.

[0434] Eleven of the controls were male, 20 were female with a median age of 43 at the time of endoscopy. Six of the controls had normal colonoscopies for colon cancer screening, 9 controls had symptoms consistent with irritable bowel syndrome and had a normal colonoscopic investigation and 7 patients had a colonoscopy for another indication and histologically normal biopsies were obtained. Eight control patients had abnormal inflamed colonic biopsies (1 pseudomembranous colitis, 1 diverticulitis, 1 amoebiasis, 2 microscopic colitis, 1 eosoinophilic infiltrate, 2 scattered lymphoid aggregates and a history of gastroenteritis). Written informed consent was obtained from all patients. Lothian Local Research Ethics Committee approved the study protocol: REC 04/S 1103/22.

[0435] Biopsy Collection. Anatomical location was confirmed by an experienced operator, distance of endoscope insertion and endoscope configuration using a Scope Guide™. Paired biopsies were taken from each anatomical location. One biopsy was sent for histological examination and the other was snap frozen in liquid nitrogen for RNA extraction. Each biopsy was graded histologically, by an experienced gastrointestinal pathologist as having no evidence on inflammation, biopsies with evidence of chronic inflammation and predominately chronic inflammatory cell infiltrate or simply those with acute inflammation and an acute inflammatory cell infiltrate. One hundred and thirty nine paired UC biopsies and 76 paired control biopsies were collected. The number of paired biopsies in UC patients and controls from each anatomical location are shown in Table 5.

TABLE 5

| | UC (n = 67) | Controls (n = 31) |
|---|---|---|
| Total number of paired biopsies | 139 | 76 |
| Terminal Ileum | 4 | 6 |
| Ascending colon | 33 | 17 |
| Descending colon | 35 | 23 |
| Sigmoid colon biopsies. | 57 | 27 |
| Removed from analysis | 10 | 3 |

[0436] RNA Isolation. The biopsies weighed between 0.2 mg and 16.5 mg with a median weight of 5.5 mg. Total RNA was extracted from each biopsy using the micro total RNA isolation from animal tissues protocol (Qiagen, Valencia, Calif.), according to the manufacturer's instructions. To evaluate purity and integrity 1 μL of total RNA was assessed each sample with the Agilent technologies 2100 bioanalyzer using the Pico LabChip reagent set (Agilent Technologies, Palo Alto, Calif.).

[0437] Microarray Analysis.

[0438] 1 μg of total RNA was amplified using the Low RNA Input Fluorescent Linear Amplification protocol (Agilent Technologies, Palo Alto, Calif.). A T7 RNA polymerase single round of linear amplification was carried out to incorporate Cyanine-3 and Cyanine-5 label into cRNA. The cRNA was purified using the RNeasy Mini Kit (Qiagen, Valencia, Calif.). 1 μl of cRNA was quantified using the NanoDrop ND-1000 spectrophotometer (NanoDrop Technologies, Wilmington, Del.).

[0439] 750 ng of Universal Human Reference (Stratagene, La Jolla, Calif.) cRNA labeled with Cyanine-3 and 750 ng of the test sample cRNA labeled with Cyanine-5 were fragmented for 30 minutes at 60° C. before loading onto Agilent Whole Human Genome microarrays (Agilent technologies, Palo Alto, Calif.). The samples were hybridized for 18 hours at 60° C. with constant rotation. Microarrays were washed, dried and scanned on the Agilent scanner according to the manufacturer's protocol (Agilent technologies, Palo Alto, Calif.). Microarray image files were analyzed using Agilent's Feature Extraction software version 7.5 (Agilent Technologies, Palo Alto, Calif.). The distribution of log intensities for each sample was plotted and outlier samples (i.e. greater than 2 standard deviations from the mean) were excluded from analysis. 10 UC samples and 3 control samples were designated as outliers using these criteria.

[0440] Real Time PCR.

[0441] Confirmation real time PCR analysis was carried out on 8 genes—SAA1, IL8, DEFA5, DEFA6, MMP3, MMP1, S100A8 and TLR4. Ten healthy control sigmoid colon biopsies with normal histology, 9 quiescent UC sigmoid biopsies and 11 UC sigmoid biopsies with an acute (6 biopsies) or chronic (5 biopsies) inflammatory cell infiltrate were selected to represent the different disease groups after stratifying to represent a range of SAA1 and IL-8 expression.

[0442] Prior to RTPCR analysis 1 RNA amplification cycle was carried out using the MessageAmp™ II aRNA Amplification Kit protocol (Ambion technologies, Austin, Tex.). Reverse transcription PCR was then performed on 50 ng of RNA using Stratagene model MX4000 (La Jolla, Calif., USA). TaqMan primers and probes were manufactured in house (Genentech Inc, South San Francisco, Calif.). The sequences for the forward probe, the reverse probe and the TaqMan probe were as follows—

SAA1,
[SEQ ID NO: 235]
forward-agcgatgccagagagaata,
reverse-ggaagtgattggggtctttg,
Taq-ctttggccatggtgcggagg,
IL-8,
[SEQ ID NO: 236]
forward-actcccagtcttgtcattgc,
reverse-caagtttcaaccagcaagaa,
Taq-tgtgttggtagtgctgtgttgaattacgg,
DEFA5,
[SEQ ID NO: 237]
forward-gctacccgtgagtccctct,
reverse-tcttgcactgctttggtttc,
Taq-tgtgtgaaatcagtggccgcct,
DEFA6,
[SEQ ID NO: 238]
forward-agagctttgggctcaacaag,
reverse-atgacagtgcaggtcccata,
Taq-cacttgccattgcagaaggtcctg,
MMP3,
[SEQ ID NO: 239]
forward-aagggaacttgagcgtgaat,
reverse-gagtgcttccccttctcttg,
Taq-ggcattcaaatgggctgctgc,
MMP7,
[SEQ ID NO: 240]
forward-cacttcgatgaggatgaacg,
reverse-gtcccatacccaaagaatgg,
Taq-ctggacggatggtagcagtctaggga,
S100A8,
[SEQ ID NO: 241]
forward-ttgaccgagctggagaaag,
treverse-tcaggtcatccctgtagacg,
Taq-ccctgataaaggggaatttccatgc
and
TLR4,
[SEQ ID NO: 242]
forward-agagccgctggtgtatcttt,
reverse-ccttctgcaggacaatgaag,
Taq-tggcagtttctgagcagtcgtgc.

[0443] PCR conditions comprised of 48° C. for 30 minutes, 95° C. hold for 10 minutes, followed by 40 cycles of 30 second 95° C. melt and 1 minute 60° C. anneal/extend. Absolute quantification of product was calculated by normalizing to RPL19. Results were analyzed using SAS and JMP software (SAS, North Carolina).

[0444] In Situ Hybridization for Defensin Alpha 5.

[0445] PCR primers were designed to amplify a 318 bp fragment of DEFA5 spanning from nt 55-372 of NM_{—}021010 (upper-5′ catcccttgctgccattct [SEQ ID NO:243] and lower-5′ gaccttgaactgaatcttgc [SEQ ID NO:244]). Primers included extensions encoding 27-nucleotide T7 or T3 RNA polymerase initiation sites to allow in vitro transcription of sense or antisense probes, respectively, from the amplified products. Endoscopic biopsies were fixed in 10% neutral buffered formalin and paraffin-embedded. Sections 5 μm thick were deparaffinized, deproteinated in 10 ug/ml Proteinase K (Amresco) for 45 minutes at 37° C., and further processed for in situ hybridization as previously described. (Jubb et. al. Methods Mol. Biol. 2006; 326:255-264) ³³P-UTP labeled sense and antisense probes were hybridized to the sections at 55° C. overnight. Unhybridized probe was removed by incubation in 20 μg/ml RNase A for 30 min at 37° C., followed by a high stringency wash at 55° C. in 0.1×SSC for 2 hours and dehydration through graded ethanols. The slides were dipped in NTB nuclear track emulsion (Eastman Kodak), exposed in sealed plastic slide boxes containing desiccant for 4 weeks at 4° C., developed and counterstained with hematoxylin and eosin.

[0446] Immunohistochemistry for Rabbit Anti-Human Lysozyme and Rabbit Anti-Human Defensin Alpha 6

[0447] Formalin fixed paraffin embedded tissue sections were rehydrated prior to quenching of endogenous peroxidase activity (KPL, Gathersburg, Md.) and blocking of avidin and biotin (Vector, Burlingame, Calif.). Sections were blocked for 30 minutes with 10% normal goat serum in PBS with 3% BSA. Tissue sections were then incubated with primary antibodies for 60 minutes at room temperature, biotinylated secondary antibodies for 30 min, and incubated in ABC reagent (Vector, Burlingame, Calif.) for 30 minutes followed by a 5 minute incubation in metal enhanced DAB (Pierce, Rockford, Ill.). The sections were then counterstained with Mayer's hematoxylin. Primary antibodies used were rabbit anti-human lysozyme at 5.0 μg/m1 (Dako, Carpinteria, Calif.) and rabbit anti-human DEFA6 at 5.0 μg/ml (Alpha Diagnostics, SanAntonio, Tex.). Secondary antibody used was biotinylated goat anti-rabbit IgG at 7.5 μg/m1 (Vector, Burlingame, Calif.). DEFA6 alpha staining required pre-treatment with Target Retrieval High pH (Dako, Carpenteria, Calif.) at 99° C. for 20 minutes, lysozyme staining did not require pretreatment. All other steps were performed at room temperature.

[0448] Data Analysis. Microarray data were analyzed using the Rosetta Resolver software (Rosetta Inpharmatics, Seattle). Statistical significance of the microarray data was determined by Student's unpaired t test. p<0.01 and a fold change of greater or less than 1.5 were considered statistically significant. Fold change data was calculated using the Rosetta Resolver software. Gene ontology was analyzed using Ingenuity software (Ingenuity Systems, Mountain View, Calif.). The Mann-Whitney U test was used to analyze the real time PCR data. p<0.05 was considered significant.

[0449] Results

[0450] Influence of anatomical location on gene expression in the healthy colon and terminal ileum. 56 histologically normal biopsies from control patients were analyzed by unsupervised hierarchical clustering. Clear separation by anatomical location was observed on one side of the dendrogram 25/25 biopsies were from the left colon (descending colon or sigmoid colon) where as on the other side of the dendrogram 20/31 biopsies were from the ascending colon (χ²=25.1, p<0.0001) (FIG. 1). 6/6 of the terminal ileal biopsies were clustered together. Biopsies from individual patients did not cluster together. The genes driving the differential expression between the right and left colon that were causing the observed clustering were predominately involved in the embryological development of the GI tract—HOXA13, (FC +4.93, p=2.3×10⁻¹⁶), HOXB13 (FC +16.96, p<1×10⁻⁴⁵), GLI1 (FC +2.2, p=4.0×10⁻²⁴), and GLI3 (FC +2.3, p=2.1×10⁻²⁸) were all upregulated in the left colon.

[0451] Analysis of Expression in UC and Control Biopsies.

[0452] Using unsupervised hierarchical clustering we were unable to differentiate between biopsies from UC patients and controls patients. In addition no clustering based on the inflammation status of the biopsies was observed. The only clustering that was observed was with biopsies from the terminal ileum where both UC and control biopsies clustered together. When all of the UC biopsies (129) and control biopsies (73) were compared, 143 sequences had a fold change of greater than 1.5 in the UC biopsies (0.01>p>10⁻⁴⁵) and 54 sequences had a fold change of less than 1.5 (0.01>p>10⁻²⁰) (data not shown).

[0453] Serum amyloid A1 (SAA1) was the most up regulated gene (Fold change (FC) +8.19, p<10⁻⁴⁵). Other notably upregulated genes were S100A8 (FC +3.50, p=2.3×10⁻¹⁷), S100A9 (FC +3.06, p=4.1×10⁻¹³), the alpha defensins, alpha 5 (DEFAS) (FC +3.25, p=0.00003), alpha 6 (DEFA6) (FC +2.18, p=6.95×10⁻⁷) and the matrix metalloproteinases MMP3 (FC +2.17, p=5.6×10⁻¹⁰) and MMP7 (FC +2.29, p=2.3×10⁻⁷).

[0454] A list of the genes found to be differentially expressed in UC patients when compared to normal patients can be found in Tables 1A, 1B, and 2A as described above.

[0455] The differential gene expression of a number of candidate genes across more than one experiment is shown in Table 6. Table 6 shows fold changes and p values are shown in a number of different genes in four different experiments. The number of biopsies analyzed in each experiment is shown in brackets. Significant consistent changes in expression across more than one experiment were observed for the genes of interest in this table.

TABLE 6

| | | | Non-inflamed | | | | | |
|---|---|---|---|---|---|---|---|---|
| | | | UC | | Inflamed UC | | Inflamed UC | |
| | All UC (129 | | sigmoid (22) v | | sigmoid (35) v | | sigmoid (35) v | |
| | biopsies) v | | non-inflamed | | inflamed | | non-inflamed | |
| | controls (73 | | control sigmoid | | control sigmoid | | sigmoid UC | |
| Genes | biopsies) | | (18) | | (8) | | (22) | |
| Analyzed | Fold change | p value | Fold change | p value | Fold change | p value | Fold change | p value |
| SAA1 | +8.19 | <10⁻⁴⁵ | +2.0 | 0.00024 | +17.5 | 2.9 × 10⁻²¹ | +16.51 | <10⁻⁴⁵ |
| Def alpha 5 | +3.25 | 0.00003 | +1.02 | 0.89 | +7.27 | 6.3 × 10⁻³⁰ | +8.44 | <10⁻⁴⁵ |
| Def alpha 6 | +2.18 | 6.95 × 10⁻⁷ | −1.09 | 0.34 | +4.41 | 9.7 × 10⁻⁹ | +6.72 | 4.16 × 10⁻¹⁹ |
| S100A8 | +3.50 | 2.3 × 10⁻¹⁷ | +1.21 | 0.19 | +9.75 | 2.4 × 10⁻²⁴ | +6.84 | 1.16 × 10⁻¹⁹ |
| S100A9 | +3.06 | 4.1 × 10⁻¹³ | +1.05 | 0.16 | +7.53 | 6.4 × 10⁻¹² | +7.11 | 1.96 × 10⁻³² |
| MMP3 | +2.17 | 5.6 × 10⁻¹⁰ | −1.55 | 0.0088 | +11.0 | 1.22 × 10⁻³⁷ | +8.15 | 2.32 × 10⁻³⁵ |
| MMP7 | +2.29 | 2.3 × 10⁻⁷ | +1.16 | 0.080 | +7.31 | 4.9 × 10⁻²⁴ | +5.53 | 1.01 × 10⁻²³ |
| IL8 | +2.05 | 4.2 × 10⁻¹¹ | +1.10 | 0.26 | +6.36 | 9.27 × 10⁻¹⁷ | +7.24 | 8.42 × 10⁻¹⁹ |
| TLR4 | +1.34 | 4.5 × 10⁻⁷ | +1.15 | 0.18 | +1.50 | 0.0044 | +1.54 | 0.00073 |
| TNIP3 | +8.02 | 1.1 × 10⁻¹⁷ | −1.30 | 0.20 | +7.53 | 2.93 × 10⁻¹³ | +10.5 | 1 × 10⁻³⁸ |
| CCL20 | +1.30 | 0.00011 | +1.25 | 0.020 | +1.79 | 0.00002 | +2.36 | 4.68 × 10⁻¹¹ |
| ABCB1 | −1.32 | 0.00091 | +1.10 | 0.40 | −1.82 | 5.6 × 10⁻⁶ | −1.92 | 9.0 × 10⁻¹⁰ |
| HLA-DRB1 | +1.03 | 0.88 | −3.0 | 0.0010 | +3.30 | 0.033 | +2.67 | 0.0011 |
| TSLP | −1.12 | 0.31 | −2.73 | 2.7 × 10⁻¹⁰ | −1.15 | 0.61 | +1.23 | 0.092 |

[0456] Gene ontology analysis involving the genes differentially expressed between the UC and control biopsies showed a preponderance of differentially expressed genes were involved in immune response (48 genes out of a total of 679 genes classified under immune response, p=2.1×10⁻⁹, OR 2.61, CI 1.85-3.56) and response to wounding (30 genes out of a total of 359 genes classified under response to wounding, p=6.42×10⁻⁹, OR 3.14, CI 2.09-4.53) when biological systems were considered.

[0457] Analysis of expression in sigmoid colon biopsies in patients with quiescent UC and non-inflamed control biopsies. To compare expression in biopsies without an acute inflammatory signal and to remove the effect of anatomical variation, 22 biopsies from the sigmoid colon with no histological evidence of inflammation from patients with UC were compared to 18 histologically normal control sigmoid colon biopsies. 102 sequences had a fold change greater than 1.5 (0.01>p>4.77×10⁻¹³) and 84 sequences had a fold change of less than 1.5 (0.01>p>1.8×10⁻²¹) (data not shown).

[0458] Upregulated genes included defensin beta 14 (FC +2.11, p=0.00002) and SAA1 (FC +2.01, p=0.00024). Interesting genes that were down regulated included HLA-DRB1 (FC −3.0, p=0.0010) and TSLP (FC −2.73, p=2.7×10⁻¹⁰) (Table 6).

[0459] Analysis of expression in sigmoid colon biopsies in patients with active UC and inflamed control biopsies. Expression of 35 histologically inflamed sigmoid biopsies from patients with UC were compared to 8 histologically inflamed control sigmoid biopsies. Reflecting the more severe inflammation in the UC biopsies a number of genes involved in the acute inflammatory response were upregulated in the UC biopsies v the control biopsies—SAA1 (FC +17.5, p=2.9×10⁻²¹), MMP3 (FC +11.0, p=1.22×10⁻³⁷), MMP7 (FC +7.31, p=4.9×10⁻²⁴) and IL-8 (FC +6.36, p=9.27×10⁻¹⁷) (Table 6). Overall 623 sequences had a fold change of greater than 1.5 and 509 sequences had a fold change of −1.5 or less (p<0.01) (data not shown).

[0460] Inflamed versus non-inflamed UC sigmoid colon biopsies. When expression signals were compared between 35 histologically inflamed and 22 non-inflamed sigmoid colon UC biopsies 700 sequences had a fold change of greater than 1.5 (0.01>p>1×10⁻⁴⁵) and 518 sequences (0.01>p>1×10⁻⁴⁵) had a fold change of less than 1.5 in the inflamed biopsies (data not shown).

[0461] Notably upregulated genes included SAA1 (FC +16.51, p=<10⁻⁴⁵), TNFAIP3 interacting protein 3 (TNIP3) (FC +10.5, p=1×10⁻³⁸), DEFAS (FC +8.44, p=<10⁻⁴⁵), DEFA6 (FC +6.72, p=4.16×10⁻¹⁹) and regenerating islet-derived 3 gamma (REG3γ) (FC +6.99, p=<10⁻⁴⁵).

[0462] Analysis of Specific Gene Families-Alpha Defensins 5 and 6.

[0463] Expression of a number of genes of interest was further analysed, taking into consideration anatomical location and degree of inflammation in the UC samples. When DEFA5 and DEFA6 were analysed expression in the normal controls and the non-inflamed UC biopsies was similar across the different anatomical locations with there being high expression in the terminal ileum, and expression decreasing as the biopsy location became more distal in the colon (FIG. 2).

[0464] In FIG. 2, the expression of each array sample is plotted against the Agilent universal reference. Each endoscopic biopsy has been separated by patient status, biopsy inflammation status and anatomical location. The mean expression levels for each anatomical location are linked in blue. High alpha defensin 5 (panel A) and 6 (B) (DEFA5 and DEFA6) expression levels are seen in the terminal ileum of the controls and the non inflamed UC samples. The expression in these 2 groups decreased the more distally in the colon the biopsies were retrieved from. In the acute and chronically inflamed UC samples and to a lesser extent in the inflamed control samples there was a marked increase in DEFA5 and DEFA6 expression throughout the ascending, descending and sigmoid colon—sigmoid colon inflamed v non-inflamed UC samples (FC +8.44, p=<10⁻⁴⁵) for DEFA5, (FC +6.72, p=4.16×10⁻¹⁹) for DEFA6.

[0465] In the acute and chronically inflamed UC biopsies there was marked upregulation of DEFA5 and DEFA6 expression throughout the ascending, descending and sigmoid colon (Table 6).

[0466] Matrix Metalloproteinases 3 and 7.

[0467] Increased expression of MMP3 and MMP7 was observed in the acutely and chronically inflamed UC biopsies when compared to the non-inflamed UC biopsies—sigmoid colon inflamed v non-inflamed UC samples MMP3 (FC +8.15, p=2.3×10⁻³⁵) and MMP7 (FC +5.53, p=1.0×10⁻²³) (FIG. 3).

[0468] In FIG. 3, the expression of each array sample is plotted against the Agilent universal reference. Each endoscopic biopsy has been separated by patient status, biopsy inflammation status and anatomical location. The mean expression levels for each anatomical location are linked in blue. Increased expression of MMP3 (panel A) and MMP7 (B) was observed in the acutely and chronically inflamed UC biopsies when compared to the non inflamed UC biopsies—sigmoid colon inflamed v non inflamed UC samples MMP3 (FC +8.15, p=2.3×10⁻³⁵) and MMP7 (FC +5.53, p=1.0×10⁻²³). In contrast when the inflamed and non-inflamed control samples were analysed, a decrease in the expression levels of MMP3 and MMP7 in the inflamed control biopsies was observed (FC −1.62, p=0.012 and FC −2.0, p=0.0002 respectively).

[0469] ATP-binding cassette (ABC) transporter family and the Xenobiotic-transcription regulators. To further investigate this gene family, expression patterns from probes representing 48 transcriptional genes and their key mediators (PXR, FXR, LXR and CAR) were analysed. When these genes were compared in all the UC and control biopsies, 7 genes were found to significantly down regulated in the UC samples when compared to the control samples-ABCA1 (p=0.01), ABCA8 (p=0.0064), ABCB1 (p=0.0091), ABCC6 (p=0.0050), ABCB7 (p=0.0068), ABCF1 (p=0.0005) and ABCF2 (p<0.00001). Only one probe representing ABCB2 was significantly upregulated in UC (p=0.0048).

[0470] A number of ABC genes were found to be down-regulated in IBD patients as compared to normal patients (data not shown). The changes observed in ABCB1 expression appeared to be primarily driven by the inflamed UC biopsies which were significantly downregulated when compared to the non-inflamed UC biopsies in the sigmoid colon (FC −1.82, p=5.6×10⁻⁶)(Table 6). Of interest, no difference in the expression of PXR between UC and controls was observed in any of the analysis including disease location and activity.

[0471] RTPCR Analysis. In the case of 8 genes implicated by microarray expression results, confirmatory real time PCR analysis using 10 healthy control colon sigmoid biopsies with normal histology, 9 quiescent UC sigmoid biopsies and 11 UC sigmoid biopsies with an acute (6 biopsies) or chronic (5 biopsies) inflammatory cell infiltrate was undertaken. Increased SAA1 expression in the inflamed UC sigmoid colon biopsies compared to the normal control sigmoid colon biopsies and the non-inflamed UC sigmoid colon biopsies (p=0.041 and p=0.044 respectively) was observed. Elevated IL-8 expression was also confirmed in the inflamed UC sigmoid biopsies when compared to the control sigmoid biopsies (p=0.031) and a trend was observed towards there being higher IL-8 expression in the inflamed UC sigmoid colon biopsies when compared to the non-inflamed UC biopsies (p=0.089) (FIG. 4).

[0472] FIG. 4 shows the real time PCR expression data comparing expression in 10 healthy control sigmoid biopsies with normal histology, 9 quiescent UC sigmoid biopsies and 11 UC sigmoid biopsies with an acute or chronic inflammatory cell infiltrate. Expression of SAA1 (A), IL-8 (B), defensin alpha 5 (C) and defensin alpha (D) were compared between the control and the inflamed and non-inflamed UC biopsies. Standard error bars are illustrated in green in each graph.

[0473] Increased expression of DEFAS and DEFA6 in the inflamed UC sigmoid colon biopsies when compared to the non-inflamed UC sigmoid colon biopsies (p=0.0008 and p=0.0005 respectively) and the control sigmoid colon biopsies (p=0.0002 and p=0.0001 respectively) was observed (FIG. 4). Increased expression in the inflamed UC sigmoid colon biopsies when compared to the non inflamed UC sigmoid colon biopsies was also observed when MMP7, (p=0.0005), S100A8, (p=0.0029) and TLR4, (p=0.019) were examined (FIG. 5).

[0474] FIG. 5 shows the real time PCR expression data comparing expression in 10 healthy control sigmoid biopsies with normal histology, 9 quiescent UC sigmoid biopsies and 11 UC sigmoid biopsies with an acute or chronic inflammatory cell infiltrate. Expression of MMP3 (A), MMP7 (B), S100A8 (C) and TLR4 (D) were compared between the different patient groups. Standard error bars are illustrated in green in each graph. No significant change in MMP3 expression was observed when the inflamed, non-inflamed UC sigmoid colon biopsies and the control sigmoid colon biopsies were analysed.

[0475] In-Situ Hybridization and Immunohistochemistry.

[0476] To further investigate the cellular localization of the excess DEFA5& 6 expression in the colon of patients with UC, in-situ hybridization and immunohistochemistry was undertaken in a cohort of biopsies of patients with UC and controls (FIGS. 6 and 7).

[0477] FIG. 6 shows the in-situ hybridization of the terminal ileal biopsies for DEFAS showed strong hybridization in the basal crypts consistent with Paneth cell location. In the upper panel terminal ileum (TI), the antisense probe shows strong hybridization in the basal crypts consistent with Paneth cell location. In the lower panel terminal ileum (TI), no significant hybridization was observed with sense control probe. Panel A shows the sigmoid colon biopsy of a non-inflamed control patient. Panels B, C, & D show strong, multifocal hybridization in the basal crypt region of UC sigmoid colon biopsies consistent with Paneth cell metaplasia. In the UC biopsies taken from the sigmoid colon strong, multifocal hybridization in the basal crypt region of these biopsies was observed and this would be consistent with Paneth cell metaplasia. This was not observed in the non-inflamed control biopsies.

[0478] FIG. 7 shows the in-situ hybridization of the terminal ileal biopsies for DEFA6. In panel A, terminal ileum immunohistochemistry shows positive staining in the basal crypts consistent with Paneth cell location. In panels B & C, no significant staining was observed in the non-inflamed control patients. In panels D, E, & F, strong, multifocal staining in the basal crypt region of UC sigmoid colon biopsies consistent with Paneth cell metaplasia. Immunohistochemistry for DEFA6 confirmed that in the sigmoid colon UC biopsies, staining was observed in the basal crypt region of these biopsies consistent with Paneth cell metaplasia. Again, this was not observed in the non-inflamed control biopsies (FIG. 7).

[0479] Expression of Genes within the IBD2 Locus. Using the markers defining the IBD2 locus we identified 526 Agilent probes representing genes or expressed sequence tags within this locus on chromosome 12. 12 probes had a greater or less than 1.5 fold change in expression with p<0.01 when expression of acute and chronically inflamed UC sigmoid colon biopsies were compared to non-inflamed UC sigmoid colon biopsies (Table 7).

TABLE 7

| | | UC sigmoid | |
|---|---|---|---|
| | | inflamed | |
| | | (35 biopsies) v | |
| | | non-inflamed (25) | |
| Agilent Probe | Gene Symbol | fold change | p value |
| A_23_P98876 | SLC39A5 | −1.52855 | 1.36 × 10⁻⁷ |
| A_24_P647146 | HDAC7A | 1.53876 | 3.15 × 10⁻¹⁶ |
| A_24_P941773 | DKFZP586A0522 | −2.27306 | 2.31 × 10⁻¹¹ |
| A_24_P945113 | ACVRL1 | 1.57956 | 6.33 × 10⁻⁹ |
| A_23_P128230 | NR4A1 | 1.81844 | 0.00005 |
| A_23_P331098 | K5B | 2.3845 | 0.0004 |
| A_24_P246636 | A_24_P246636 | −1.69754 | 7.06 × 10⁻⁸ |
| A_23_P2233 | SILV | 1.51557 | 9.07 × 10⁻⁹ |
| A_23_P105251 | GLI | −1.54447 | 7.73 × 10⁻⁹ |
| A_32_P3783 | HMGA2 | −1.94107 | 2.37 × 10⁻⁹ |
| A_23_P162300 | IRAK3 | 1.7382 | 3.11 × 10⁻¹⁵ |
| A_32_P83256 | IRAKM | 1.70847 | 4.56 × 10⁻¹⁰ |

[0480] Analysis of the 526 expression probes located within the IBD2 locus identified 12 probes that were significantly differentially regulated when the inflamed UC sigmoid colon biopsies were compared to the non-inflamed UC sigmoid colon biopsies.

[0481] Table 3A (provided above) lists those genes from the IBD2 locus on chromosome 12 that were found to be up-regulated in IBD patients as compared to normal patients.

[0482] Table 3B (provided above) lists those genes from the IBD2 locus on chromosome 12 that were found to be down-regulated in IBD patients as compared to normal patients.

[0483] Interesting candidate genes that were differentially regulated in the inflamed UC sigmoid samples included keratin 5B (FC +2.38, p=0.0004), MMP19 (FC +1.95, p=0.0084), GLI 1(FC −1.54, p=7.3×10⁻⁹), interleukin-1 receptor-associated kinase 3 (FC +1.74, p=3.1×10⁻¹⁵) and interleukin-1 receptor-associated kinase M (FC +1.71, p=0.0014).

[0484] When the acute inflammatory signal was removed and non-inflamed UC sigmoid biopsies and non-inflamed control sigmoid biopsies were compared, no sequences had a fold change greater or less than 1.5. However, notably downregulated genes included tubulin alpha 5 (FC −1.32, p=9.0×10⁻⁶) and tubulin alpha 6 (FC −1.45, p=1.2×10⁻⁵), molecules involved in the microtubule cytoskeleton and barrier integrity of the bowel.

[0485] Expression of Genes within the IBDS Locus. Agilent probes representing 11 genes within the with IBDS locus were identified and compared in healthy control, non-inflamed and inflamed UC biopsies (Table 8). Table 8 shows the fold changes in expression of genes within the IBDS locus comparing controls and patients with UC, who have been stratified for the degree of inflammation observed in their sigmoid biopsies. Significant down regulation of the organic cation transporters SLC22A4 and SLC22A5 was observed when inflamed UC sigmoid biopsies were compared to non-inflamed UC sigmoid biopsies.

TABLE 8

| | | | Inflamed sigmoid | | | |
|---|---|---|---|---|---|---|
| | All UC (129) v | | (35) v non-inflamed | | Non-inflamed UC sigmoid | |
| Genes | controls (73) | | sigmoid (22) (UC) | | (22) v non inflamed control | |
| Analyzed | Fold change | p value | Fold change | p value | sigmoid (18) Fold change | p value |
| IL4 | +1.00 | 0.96 | +1.06 | 0.62 | +1.14 | 0.40 |
| IL13 | +1.12 | 0.057 | −1.02 | 0.82 | 1.00 | 0.98 |
| RAD50 | +1.02 | 0.20 | −1.20 | 3.5 × 10⁻⁶ | +1.08 | 0.062 |
| IL5 | +1.09 | 0.037 | +1.10 | 0.17 | +1.04 | 0.53 |
| IRF1 | +1.10 | 0.35 | +1.12 | 2.9 × 10⁻⁶ | −1.01 | 0.62 |
| SLC22A5 | −1.26 | 3.37 × 10⁻⁶ | −1.50 | 2.2 × 10⁻⁶ | +1.02 | 0.75 |
| SLC22A4 | −1.18 | 0.11 | −1.79 | 1.53 × 10⁻⁹ | +1.22 | 0.63 |
| PDLIM4 | +1.10 | 0.0056 | +1.14 | 0.00039 | +1.01 | 0.78 |
| P4HA2 | −1.05 | 0.13 | 1.00 | 0.98 | −1.05 | 0.28 |
| CSF2 | +1.10 | 0.056 | +1.19 | 0.052 | −1.04 | 0.63 |
| IL3 | −1.01 | 0.39 | +1.02 | 0.67 | +1.01 | 0.75 |

[0486] Table 3A (provided above) lists those genes from the IBDS locus on chromosome 5 that were found to be up-regulated.

[0487] vNon significant, but consistent fold increases in expression were observed when IRF1 and PDLIM4 expression was compared in inflamed and non-inflamed UC sigmoid colon biopsies, (FC +1.12, p=2.9×10⁻⁶ and FC +1.14, p=0.00039, respectively).

[0488] Table 3B (provided above) lists those genes from the IBDS locus on chromosome 5 that were found to be down-regulated in IBD patients as compared to normal patients. SLC22A5 (OCTN2) was downregulated in UC biopsies compared to controls (FC −1.26 p=3.37×10⁻⁶) and when inflamed UC sigmoid colon biopsies were compared to non-inflamed UC sigmoid colon biopsies (FC −1.50, p=2.2×10⁻⁶). Expression of SLC22A4 (OCTN1) was also downregulated in inflamed UC sigmoid colon biopsies compared to non-inflamed UC sigmoid colon biopsies (FC −1.79, p=1.5×10⁻⁹), however when all UC biopsies were compared to controls, no change was observed (FC −1.18, p=0.11).

[0489] Gene Expression and Disease Activity. Sigmoid colon biopsies from newly diagnosed UC patients who were undergoing endoscopy (8 biopsies) and sigmoid biopsies from patients with established active UC (18 biopsies) were compared. In the newly diagnosed UC sigmoid biopsies, 861 sequences were upregulated with a fold change of greater than 1.5 and p<0.01, and 373 sequences were downregulated with a fold change of less than 1.5 and p<0.01 (data not shown).

[0490] The 3 most upregulated genes in the newly diagnosed patients were Selectin E (FC +10.95, p=1.8×10⁻⁶), CCL19 (FC +7.42, p=4.7×10⁻¹⁵) and IL-8 (FC +7.32, p=2.9×10⁻⁷), and down regulated genes included S100P (FC −6.4, p=2.0×10⁻⁹).

[0491] Sigmoid colon biopsies from patients from UC patients with a simple clinical colitis activity index (SCCAI) of more than 2 (27 biopsies) were compared to sigmoid colon biopsies from UC patients with a SCCAI of 2 or less (30 biopsies). 813 sequences were upregulated and 444 sequences were downregulated. Among the most upregulated genes were those that were involved in the acute inflammatory response IL-8 (FC +8.86, p=4.4×10⁻¹²), MMP3 (FC +6.5, p=3.2×10⁻¹⁹), MMP7 (FC +5.3, p=3.4×10⁻²¹) and DEFA6 (FC +4.5, p=2.7×10⁻¹²). Down regulated genes included UGT2B15 (FC −4.5, p=0.0013), UGT2B17 (FC −2.8, p=0.0059) and UGT2B10 (FC −2.2, p=0.0038), all members of the UGT family which are involved in cellular detoxification and excretion.

[0492] Table 3A (provided above) lists additional genes identified in the present study observed to be up-regulated in UC patients as compared to normal patients, while Table 3B (provided above) lists additional genes identified in the present study observed to be down-regulated in UC patients as compared to normal patients.

[0493] Discussion

[0494] The present study represents the most rigorous microarray analysis yet reported comparing intestinal gene expression in patients with UC, with healthy controls as well as in patients with other causes of colonic inflammation. The data provide important information on anatomical pattern of gene expression in the healthy colon, with intriguing differences in the right and left colon. Moreover, strong evidence for dysregulated gene expression characteristic of UC has been provided and overall these data provide valuable insight into gene expression in normal physiological homeostasis and during the pathological process of UC.

[0495] The strengths of this data set are the size of the study undertaken, the meticulous assessment of disease phenotype, the documenting of anatomical location for each biopsy and the avoidance of confounding effects due to pooling of samples. Thereby, we have been able to remove a considerable amount of background variability that has hampered previous studies. (Marshall E. Science 2004; 306:630-631; Ioannidis J P. Lancet 2005; 365:454-455).

[0496] Moreover, the present study has addressed the potentially critical confounding effect of the strength of the non-specific acute inflammatory signature. Quiescent biopsies from patients with UC and controls were compared and from these analysis we were able to gain valuable insight into the pathogenesis of UC. In addition, the present study provided access to a proportion of patients with newly diagnosed disease, overcoming treatment related alterations in gene expression. A further strength of our study has been the fact that real time PCR analysis consistently confirmed the significant changes of in expression in all but one of the candidate genes of interest, strongly validating the microarray data and increasing substantially the confidence associated with the interpretation of the data.

[0497] This is the first microarray study to show a gradient in expression of a number of genes along the healthy adult colon. These results contrast with data from Costello and colleagues where no significant differences in expression patterns were observed when comparing biopsies from caecum, transverse colon, descending colon and sigmoid colon (Costello C M, et al. PLoS Med 2005; 2:e199). The observed differences in these data sets may be explained by our analysis looking only at non-inflamed control samples where as Costello investigated control and diseased patients.

[0498] Genes involved in developmental pathways—the HOX family and the hedgehog signaling pathway appeared to be the most differentially regulated along the anatomical length of the healthy colon. HOXA13 has been shown play a crucial role in the development of the tail gut and mutations in the gene result in urogenital abnormalities, (De Santa et. al. Development. 2002; 129:551-561) and interestingly it has been shown that HOXB13 expression is down regulated in colorectal tumours from the distal left colon. (Jung et. al. Br J. Cancer. 2005; 92:2233-2239)

[0499] The hedgehog signaling pathway is also crucial to the normal growth and development of the human gastrointestinal system and a number of congenital diseases that affect the gut are due to mutations in genes involved in this pathway. (Lees et. al. Gastroenterology. 2005; 129:1696-1710) GLI-1 is one of the major effector molecules of the hedgehog signaling pathway and the GLI-1 gene lies within the IBD2 locus, an area that has previously been shown to be associated with UC. (Parkes et. al. Am J Hum Genet. 2000; 67:1605-1610; Satsangi, et. al, Nat. Genet. 1996; 14:199-202) Data from the present study would also suggest that GLI-1 is downregulated in inflamed UC biopsies compared to non inflamed biopsies from patients with UC. Recent data from our unit has shown a strong association between mutations in the GLI-1 gene and UC. (Lees et. al. Gastroenterology. 2006; 130:A52)

[0500] Further recent data published by Varnat and colleagues have suggested that PPARβ negatively regulates Paneth cell differentiation by downregulating the expression of Indian hedgehog, another of the major effector molecules in the hedgehog signaling pathway. (Varnat et. al. Gastroenterology. 2006; 131:538-553) Our data have shown upregulation of the alpha defensins 5 and 6 in the colon of patients with inflamed UC compared to non-inflamed biopsies from patients with UC and controls, and immunohistochemistry and in-situ hybridization have shown that this is largely mediated by Paneth cell metaplasia. It is intriguing to speculate that in patients with UC, further as yet undetermined defects in the Hedgehog signaling pathway may result in unregulated Paneth cell differentiation, Paneth cell metaplasia, increased alpha defensin 5 and 6 expression, and mucosal inflammation.

[0501] Indeed among the most stimulating observations in the present study were the data showing the upregulation of the alpha defensins 5 and 6 in patients with UC. Alpha defensins 5 and 6 are small cationic proteins that are part of the innate immune response and they have potent antimicrobial properties against gram positive and gram negative bacteria. (Ouellette A J. Springer Semin Immunopathol. 2005; 27:133-146) They are stored as pro-molecules in Paneth cells which in the healthy colon are largely restricted to the terminal ileum and on release into the mucosa they are cleaved by trypsin to the active antimicrobial peptide. (Ghosh et. al. Nat Immunol 2002; 3:583-590)

[0502] In our data set, high levels of alpha defensin expression were observed in the terminal ileal biopsies of non-inflamed controls and patients with UC. Levels of expression in the control patients and patients with quiescent UC fell as the location that the biopsies were retrieved from became more distal in the colon—ascending colon, descending colon and sigmoid colon. However, in the inflamed UC biopsies increased expression of both alpha defensins 5 and 6 was observed at each anatomical location that was biopsied. Lawrance and colleagues also noted the defensins alpha 5 and 6 were upregulated in patients with UC compared to controls, (Lawrance et. al. Hum Mol. Genet. 2001; 10:445-456) although, RNA was extracted from surgical resections and no details about the anatomical location of these specimens were given.

[0503] Recent data examining the expression of the alpha defensins 5 and 6 in patients with CD in the terminal ileum would suggest that expression levels are reduced irrespective of the degree of inflammation when compared to control terminal ileal tissue and this may be responsible for the terminal ileal phenotype observed in CD. (Wehkamp et. al. Proc Natl Acad Sci USA. 2005; 102:18129-18134) Whether the observed increase in alpha defensin 5 and 6 expression in our data set is a primary phenomenon related to disease pathogenesis, or whether it is secondary phenomenon protecting a previously damaged epithelial surface to microbial invasion may be resolved by looking for critical variants within these genes that are associated with disease susceptibility and altered function of these peptides.

[0504] It is of interest that many but not all of our results are broadly in line with two of the landmark microarray papers in IBD. Consistent with data from Lawrance and colleagues (Lawrance et. al. Hum Mol. Genet. 2001; 10:445-456) we have shown upregulation of S100A8 & A9 and the alpha defensins 5 & 6 in UC. However, no overlap was observed in the differentially expressed probes in the IBD2 locus in the present study and in that of Lawrance. Dieckgraefe and colleagues (Dieckgraefe et. al. Physiol Genomics. 2000; 4:1-11) observed upregulation of a number of the MMP genes, consistent with our data and interestingly members of the REG family were shown to be upregulated in the colon of patients with UC, probably as a result of Paneth cell metaplasia.

[0505] The downregulation of ABCB1 in our dataset is of significant interest, and consistent with earlier microarray data from Langman, Dieckgraefe and Lawrance and colleagues. (Dieckgraefe et. al. Physiol Genomics. 2000; 4:1-11; Lawrance et. al. Hum Mol. Genet. 2001; 10:445-456; Langmann et. al. Gastroenterology. 2004; 127:26-40) In addition to this, we have observed that the expression in ABCB1 displayed a decreasing gradient, with gene expression lowest in the sigmoid colon in UC. This pattern of expression is perhaps consistent with the hypothesis associating loss-of-function of P-glycoprotein (gene product of ABCB1) in UC, and in line with the clinical presentation of UC. The current data illustrate the importance of ABCB1 in the disease pathogenesis of UC, as highlighted in recent genetic and animal functional data. (Moodie et. al. Glucocorticoid access and action in the rat colon: expression and regulation of multidrug resistance 1a gene (mdr1a), glucocorticoid receptor (GR), mineralocorticoid receptor (MR) and 11-beta-hydroxysteroid dehydrogenase type 2 (11BHDS2). 197 ed. 2003)

[0506] ABCB1 encodes P-glycoprotein 170, an efflux epithelial transporter involved in gut barrier defence and xenobiotic metabolism. It is pertinent that when the entire class of proteins sharing homology with ABCB1 were analyzed, a further 6 out of 48 genes (12.5%) of the ABC transporters were significantly dysregulated in UC; suggesting an important role in this class of protein in the aetiopathogenesis of UC.

[0507] In contrast to data produced by Langmann we did not observe any changes in expression of the transcriptional regulator Pregnane-X receptor. These negative data are consistent with genetic studies carried out in the IBD population in Edinburgh—using a haplotype tagging approach, there was an association between the ABCB1 gene and UC, (Ho et. al. Hum Mol. Genet. 2006; 15:797-805) but no association between the Pregnane-X receptor and UC. (Ho G T et. al. Gut. 2006; 55:1676-1677) Aspects of study design may explain the differences observed in this context between our data and those of Langmann and colleagues, as our analysis took in to consideration the inflammation status of the biopsies and anatomical location. In our data set we did not pool samples, thus carrying out a large number of microarrays, where as Langmann and colleagues pooled terminal ileal and colon biopsies and this difference in methodology may also account for the different results.

[0508] The matrix metalloproteinases (MMPs) comprise of a family of greater than 23 zinc-dependent enzymes that are end stage effecter molecules involved in the degradation of extra cellular matrix components during morphogenesis and tissue remodeling. (Brinckerhoff et. al. Nat Rev Mol Cell Biol. 2002; 3:207-214) Consistent with our data, previous studies in patients with IBD have shown a marked increase in expression of MMP3 in the inflamed biopsies when compared to non inflamed biopsies and control biopsies. (Heuschkel et. al. Gut. 2000; 47:57-62; von LBet. al. Gut. 2000; 47:63-73) Data for MMP3−/− mice have also demonstrated delayed clearance of bacteria, a compensatory increase in MMP7 and reduced CD4⁺ T lymphocyte recruitment to the lamina propria. (L1 et. al. J Immunol 2004; 173:5171-5179) Furthermore, recent data have also shown a proinflammatory effect of MMP3 mediated through CXCL7 causing dose dependant neutrphil recruitment in colonic cell lines. (Kruidenier et. al. Gastroenterology. 2006; 130:127-136)

[0509] In our data set we observed a decrease in MMP3 expression in our inflamed controls compared to our non-inflamed controls suggesting that the changes observed in MMP3 and MMP7 expression in UC may be disease specific. Transmission disequilibrium testing of the 5A variant of MMP3 in the German population showed an association with CD and not UC that was not replicated in the English population. (Pender et. al. J Med. Genet. 2004; 41:e112)

[0510] We have also used this dataset to analyse the relative expression of genes mapping to susceptibility loci implicated by genome wide analysis, notably within IBD2 and IBD5. The present data will be of use in gene identification, complementing results of fine-mapping studies, and genome-wide case-control studies currently underway. In this context it is of considerable interest to review our data concerning the IBD5 locus which spans a cytokine cluster containing a number of attractive candidate genes was initially discovered by genome wide scanning in 2000. (Rioux et. al. Am J Hum Genet. 2000; 66:1863-1870; Ma et. al. Inflamm Bowel Dis. 1999; 5:271-278) The tight linkage disequilibrium spanning the IBD5 linkage interval, has limited previous genetic studies, and these have not been sufficiently powered to identify the susceptibility gene within this region. (Waller, et. al. Gut. 2006; 55:809-814; Fisher et. al. Hum Mutat. 2006; 27:778-785; Noble et. al. Gastroenterology. 2005; 129:1854-1864)

[0511] Downregulation of the positional candidate gene encoding the organic cation transporter SLC22A5 (OCTN2) was observed when UC biopsies were compared to control biopsies and in both SLC22A4 (OCTN1) and SLC22A5 down regulation was observed in the inflamed UC sigmoid colon biopsies compared to non-inflamed sigmoid biopsies. These provocative data would suggest that decreased expression of these genes may after all be involved in the pathogenesis of UC, and these data thereby may sustain interest in these genes. Peltekova and colleagues suggested that two variants in these genes—SLC22A4 (1672C→T) and the SLC22A5 variant (−207G→C) conferred disease susceptibility to CD, (Peltekova et. al. Nat. Genet. 2004; 36:471-475) however, when expression was compared in the small number of patients in this study who had been genotyped for these mutations no change in expression was observed between wild type and TC homozygote patients (data not shown). Expression of IRF-1 and PDLIM4, both plausible candidates within IBDS was also dysregulated, emphasizing the uncertainties pertaining to this locus at present. Within the IBD2 locus, a series of dysregulated genes were identified in the present dataset, of which only GLI 1 has been subjected to detailed mutation analysis.

[0512] In conclusion these data have rigorously characterized expression of the whole genome in the terminal ileum and colon of patients which UC and controls. The studies provide new insights into regional variation of gene expression in the healthy colon, and also considerably extend previous studies in UC. These data identify a number of key regulators of intestinal inflammation, notably the alpha defensin family, hedgehog signaling molecules, and matrix metalloproteinases.

### Example 3

### Immunohistochemistry

### DefA6 Expression in IBD Biopsies

[0513] Defensin alpha 6 is normally expressed by Paneth cells in the small intestine crypt epithelium and not in colon epithelial cells. We had observed increased DefA6 expression at the RNA level in ulcerative colitis and Crohn's disease patients using Agilent microarray and in taqman on biopsy lysates. This experiment evaluated if increased DefA6 protein expression could be seen in formalin fixed colon biopsies.

[0514] Our studies show, as expected, that there was no DefA6 staining in colon biopsies from non-IBD control patients with no histologic evidence of inflammation. We also evaluated one non-IBD control patient with a diagnosis of microscopic colitis. In that patient, DefA6 was present in sigmoid colon crypt epithelial cells.

[0515] In ulcerative colitis patients, 21 patients had scattered or clustered DefA6 staining in crypt epithelial cells of the sigmoid colon, descending colon, transverse colon, or rectum. Twenty of 21 positive patients had histologic evidence of chronic or chronic-active inflammation in their biopsy tissue. The remaining patient had predominantly acute (neutrophilic) inflammation. No patients with positive DefA6 staining in the colon had uninflamed biopsies.

[0516] There were 18 ulcerative colitis patients with no evidence of DefA6 staining in colon epithelium. The majority of these patients (10) had no histologic evidence of inflammation in the biopsy tissue. Six of the remaining patients had predominantly neutrophilic inflammation (acute inflammation) and two had chronic/chronic-active inflammation.

[0517] In summary, DefA6 expression in ulcerative colitis appears to correlated with the local inflammation status observed in the biopsy. None of the uninflamed biopsies had DefA6 staining. In addition, patients with chronic or chronic-active inflammation were more likely to have positive DefA6 staining than patients with acute inflammation.

[0518] Experimental Design: The scoring of inflammation status was based on inflammatory cell type predominance: neutrophil predominance=acute inflammation; neutrophils and mononuclear inflammatory cells=chronic active; and predominantly mononuclear inflammatory cells=chronic.

[0519] Table 9 shows the histologic findings. The expression of DefA6 is shown as “−”, “+”, or “++” and the corresponding inflammation score is provided in some cases.

TABLE 9

| Patient | HP # | Tissue | DefA6 | Inflammation status |
|---|---|---|---|---|
| 115 | HP-19891 | sigmoid | + | microscopic colitis |
| 119 | HP-19893 | descend- | − | |
| | | ing | | |
| 122 | HP-19898 | sigmoid | − | |
| 124 | HP-19899 | sigmoid | − | |
| 125 | HP-19900 | sigmoid | NA | this is a section of |
| | | | | terminal ileum |
| 125 | HP-19901 | sigmoid | − | |
| 130 | HP-19905 | rectum | − | |
| 131 | HP-19906 | sigmoid | − | |
| 135 | HP-19908 | sigmoid | − | |
| 136 | HP-19909 | sigmoid | − | |
| 222 | HP-19912 | rectum | + | chronic active |
| 223 | HP-19914 | sigmoid | + | chronic |
| 224 | HP-19916 | sigmoid | + | minimal chronic active |
| 225 | HP-19919 | sigmoid | − | no inflammation |
| 226 | HP-19920 | descend- | − | no inflammation |
| | | ing | | |
| 227 | HP-19922 | sigmoid | + | minimal chronic active |
| 230 | HP-19924 | sigmoid | − | no inflammation |
| 230 | HP-19925 | rectum | − | no inflammation |
| 231 | HP-19926 | descend- | − | acute inflammation |
| | | ing | | |
| 233 | HP-19927 | sigmoid | − | no inflammation |
| 234 | HP-19928 | descend- | − | minimal chronic active |
| | | ing | | HP |
| 235 | HP-19929 | rectum | − | acute inflammation |
| 238 | HP-19930 | sigmoid | + | chronic active |
| 239 | HP-19932 | rectum | + | minimal chronic |
| 240 | HP-19933 | rectum | − | minimal acute |
| 241 | HP-19934 | rectum | − | no inflammation |
| 244 | HP-19935 | sigmoid | − | no inflammation |
| 246 | HP-19936 | sigmoid | + | minimal chronic |
| 247 | HP-19937 | rectum | + | minimal chronic |
| 248 | HP-19938 | rectum | + | minimal chronic |
| 249 | HP-19939 | rectum | + | chronic active |
| 250 | HP-19940 | sigmoid | + | chronic active |
| 251 | HP-19941 | rectum | + | chronic active |
| 253 | HP-19942 | sigmoid | + | chronic active |
| 255 | HP-19943 | sigmoid | NA | fragmented section |
| 256 | HP-19944 | sigmoid | + | chronic active |
| 257 | HP-19947 | rectum | ++ | chronic active |
| 258 | HP-19948 | rectum | + | chronic |
| 259 | HP-19949 | sigmoid | ++ | chronic active |
| 260 | HP-19950 | sigmoid | + | chronic active |
| 261 | HP-19951 | sigmoid | − | mild acute |
| 262 | HP-19952 | sigmoid | − | acute inflammation |
| 262 | HP-19953 | rectum | − | no inflammation |
| 263 | HP-19954 | rectum | − | no inflammation |
| 265 | HP-19955 | sigmoid | + | chronic active |
| 266 | HP-19956 | rectum | + | acute inflammation |
| 267 | HP-19957 | trans- | ++ | Chronic active |
| | | verse | | |
| 270 | HP-19958 | rectum | − | Chronic active |
| 245 | HP-19965 | sigmoid | − | no inflammation |
| 245 | HP-19966 | rectum | − | acute inflammation |

### Example 4

### Analysis of Germline GLI1 Variation

[0520] Ulcerative colitis (UC) and Crohn's disease (CD) are polygenic chronic inflammatory bowel diseases (IBD) of high prevalence that are associated with considerable morbidity. The hedgehog (HH) signalling pathway plays vital roles in gastrointestinal tract development, homeostasis and malignancy. We identified a germline variation in GLI1 (within the IBD2 linkage region, 12q13) in patients with IBD. Since this IBD-associated variant encodes a GLI1 protein with reduced function, we tested whether mice with reduced Gli1 activity are susceptible to chemically induced colitis. Using a gene-wide haplotype-tagging approach, germline GLI1 variation was examined in three independent populations of IBD patients and healthy controls from Northern Europe (Scotland, England and Sweden) totaling over 5000 individuals. On log-likelihood analysis, GLI1 was associated with IBD, predominantly UC, in Scotland and England (p<0.0001). A non-synonymous SNP (rs2228226C→G), in exon 12 of GLI1 (Q1100E) was strongly implicated, with pooled odds ratio of 1.194 (C.I.=1.09-1.31, p=0.0002). GLI1 variants were tested in vitro for transcriptional activity in luciferase assays. Q1100E falls within a conserved motif near the C-terminus of GLI1; the variant GLI protein exhibited reduced transactivation function in vitro. In complementary expression studies, we noted the colonic HH response, including GLI1, PTCH and HHIP, to be down-regulated in patients with UC. Finally, Gli1+/− mice were tested for susceptibility to DSS-induced colitis. Clinical response, histology and expression of inflammatory cytokines were recorded. Gli1+/− mice rapidly developed severe intestinal inflammation, with considerable morbidity and mortality compared with wild-type. Local myeloid cells were shown to be direct targets of HH signals and cytokine expression studies revealed robust up-regulation of IL-12, IL-17 and IL-23 in this model. HH signalling through GLI1 is required for proper modulation of the intestinal response to acute inflammatory challenge. Reduced GLI1 function predisposes to IBD pathogenesis, suggesting novel therapeutic avenues.

[0521] Ulcerative colitis (UC; MIM 191390) and Crohn's disease (CD; MIM 266600) are chronic, relapsing, inflammatory bowel diseases (IBD) of high prevalence (200-400 cases per 100,000 in N Europe and N America [Loftus E V, Jr. (2004) Gastroenterology 126: 1504-1517]) and are associated with considerable morbidity. Precise aetio-pathogenetic mechanisms are not understood but several lines of evidence implicate the central importance of a dysregulated host response to intestinal bacteria [Xavier R J, Podolsky D K (2007) Nature 448: 427-434]. Epidemiological data, detailed molecular studies, and recent genome-wide association studies strongly suggest that UC and CD are related polygenic diseases that share some susceptibility loci (IL-23R, IL-12B, and NKX2.3 [Wellcome Trust Case Control Consortium (2007) Nature 447: 661-678; Duerr et al. (2006) Science 314: 1461-1463; Parkes et al. (2007) Nat Genet July; 39(7):830-2. Epub 2007 Jun. 6]), but differ at others: NOD2, ATG16L1 and IRGM are specific CD genes; the ECM1 locus is associated with UC [Parkes et al. (2007) Nat Genet July; 39(7):830-2. Epub 2007 Jun. 6; Fisher et al. (2008). Nat Genet. 40(6):710-2. Epub 2008 Apr. 27; Hampe et al. (2007) Nat Genet. 39: 207-211; Hugot et al. (2001). Nature 411: 599-603; Ogura Y et al. (2001). Nature 411: 603-606]. The IBD2 locus (OMIM 601458) on chromosome 12q13 was first identified in a UK genome-wide scan (peak LOD score 5.47 at D12583) [Satsangi et al. (1996). Nat Genet. 14: 199-202] involving both UC and CD patients. Later studies showed that IBD2 contributes significantly to UC, notably extensive disease, but perhaps in a more minor way to CD susceptibility [Achkar et al. (2006). Am J Gastroenterol 101: 572-580; Parkes M et al. (2000) Am J Hum Genet. 67: 1605-1610]. A strong candidate gene that maps to the IBD2 locus is GLI1, one of three related GLI transcription factors that transduce secreted hedgehog (HH) signals. HH signalling is key in gut development, homeostasis and malignancy, but has not been carefully studied in IBD [Lees et al. (2005) Gastroenterology 129: 1696-1710]. In developing intestine, Sonic (SHH) and Indian Hedgehog (1HH) provide a paracrine signal from epithelium to the mesenchymal receptor patched (PTCH). PTCH controls HH signal transduction through the membrane protein smoothened (SMO) and zinc finger transcription factors GLI1, GLI2, and GLI3 to direct tissue pattern and cell fate [Madison et al. (2005) Development 132: 279-289]. Chronic injury, inflammation and repair are critical aspects of IBD, and thus it is pertinent that the HH pathway is centrally involved in these processes in several other tissues, including muscle [Pola et al. (2003) Circulation 108: 479-485], liver [Jung et al. (2008) Gastroenterology 134: 1532-1543; Omenetti et al. (2008) Gut May; 134(5):1532-43. Epub 2008 Feb. 14.], and lung [Stewart et al. (2003) J Pathol 199: 488-495; Watkins et al. (2003) Nature 422: 313-317]. Indeed, HH signalling may play a central role in the inflammatory response since SHH is critical for T lymphocyte development [El Andaloussi et al. (2006). Nat Immunol 7: 418-426], adult human CD4+ T cell activation [Lowrey et al. (2002) J Immunol 169: 1869-1875; Stewart et al. (2002). J Immunol 169: 5451-5457], and myeloid cell maturation in the spleen [Varas et al., (2008) J Leukoc Biol June; 83(6):1476-83. Epub 2008 Mar. 11]. Dysregulation of components of the HH pathway has also been noted in inflammatory diseases of the gut, including Barrett's esophagus, chronic gastritis and IBD [Nielsen et al., (2004) Lab Invest 84: 1631-1642]. Using microarray gene expression analyses of colonoscopic biopsies, we recently demonstrated that GLI1 is down-regulated in the intestinal mucosa in inflamed UC compared with non-inflamed samples [Noble et al. (2008) Gut. October; 57(10):1398-405. Epub 2008 Jun. 3]. To further explore the possible association between GLI1 and IBD susceptibility, we examined haplotype variation at the GLI1 locus in several Northern European populations using a gene-wide haplotype-tagging approach. We identified a significant association with IBD strongly implicating a non-synonymous SNP in the C-terminal region of GLI1. Functional analysis of the associated variant in vitro demonstrated a 50% reduction in GLI1 transcriptional activation, evidence that this may be a functional variant increasing disease risk. These findings together led us to hypothesize that a reduced dosage of functional GLI1 protein might play an important role in colonic inflammation. To test this directly, we challenged Gli1+/− mice and their wild type (WT) littermates with dextran sodium sulphate (DSS) to induce acute intestinal inflammation. Gli1+/− mice rapidly developed severe colitis, suggesting that functional Gli1 activity is crucial to response to inflammatory stimuli in mouse and man.

[0522] Subjects and Samples. Table 10 provides detailed demographics and phenotypic data on Scottish and Cambridge IBD population. (HC—healthy control; CD—Crohn's disease; UC—ulcerative colitis; IC—indeterminate colitis.

TABLE 10

| | Scottish Panel | Cambridge Panel |
|---|---|---|
| Total number | 2183 | 2337 |
| | (1374 HC; 474 UC; | (589 HC; 928 UC; |
| | 35 CD) | 737 CD; 83 IC) |
| Sex - % male | HC 48.7%; UC 52.0%; | HC 45.0%; UC 52.6%; |
| | CD 39.6% | CD 37.0% |
| Median age at | HC 50.0 (43.0-55.0) | HC 60.0 (53.0-69.0) |
| diagnosis/re- | UC 34.1 (25.2-49.9) | UC 36.7 (26.84-50.35) |
| cruitment -years | CD 27.8 (20.8-41.1) | CD 26.1 (20.3-37.2) |
| (IQR) | | |
| CD location | | |
| Terminal ileum (L1) | 38.4% | 31.8% |
| Colon (L2) | 36.5% | 36.5% |
| Ileocolon (L3) | 25.1% | 31.7% |
| UC location | | |
| Proctitis (E1) | 17.3% | 14.8% |
| Left-sided colitis (E2) | 40.5% | 34.1% |
| Extensive colitis (E3) | 42.2% | 51.1% |
| CD 5 year behaviour | | |
| Inflammatory (B1) | 64.8% | 52.3% |
| Stricturing (B2) | 14.8% | 35.2% |
| Penetrating (B3) | 20.3% | 12.5% |
| Perianal involvement (p) | 17.4% | 24.4% |
| Surgery CD | CD 59.3% | CD 52.0% |
| | UC 18.5% | UC 11.8% |
| Smoking at diagnosis of | YES 40.7% | YES 41.8% |
| CD | NO 47.4% | NO 45.0% |
| | EX 11.9% | EX 13.2% |
| Smoking at diagnosis of | YES 19.0% | YES 12.1% |
| UC | NO 49.5% | |
| | EX 31.5% | |

[0523] Genotyping.

[0524] Scotland and Sweden: Genomic DNA was extracted from blood samples using a modified salting-out technique as previously described, and Nucleon kits. Genotypes were derived using the Taqman system for allelic discrimination; the assays were available from Applied Biosystems as Taqman SNP Genotyping Assays (7900HT sequence detection system; Applied Biosystems), except for SNPs rs10783819, rs3809114, rs507562, rs542278, rs730560, rs1669296, rs775322 which were genotyped on the Illumina platform. The accuracy of each Taqman assay was checked by repeat analysis in 5% of cases, with 100% concordance. Genotype distributions in control populations were consistent with Hardy-Weinberg Equilibrium (p>0.01) for all SNPs. Genotypes, in cases for the four tSNPs that could not be derived by Taqman were obtained by direct sequencing. Cambridge: DNA was extracted using Nucleon kits. Genotyping of CD cases and controls was performed using the Taqman biallelic discrimination system using an ABI 7900HT analyser (Applied Biosystems). Genotyping of UC cases was performed using a 1536 SNP Golden Gate bead array (Illumina). Concordance between platforms was assessed by genotyping 92 UC cases for SNPs rs2228224 and rs2228226 with concordance rates of 100% and 97.9% respectively and no evidence of systematic bias between platforms. Genotype distributions in case and control populations were consistent with Hardy-Weinberg Equilibrium (p>0.01) for all SNPs.

[0525] Gene Expression by Microarray and QPCR.

[0526] The cohort of patients used in the microarray studies consisted of 67 patients with UC, 53 with CD and 31 healthy controls (HC). For demographics, generation of microarray dataset and QPCR methodology [see Noble et al. (2008) Gut. October; 57(10):1398-405. Epub 2008 Jun. 3].

[0527] Induction of DSS-Induced Colitis and Histological Analysis.

[0528] Groups of two to four wild type Gli1+/lacZ or wild type littermate controls in mixed cages (on a C57BL/6 background) were administered 3% DSS in drinking water for 4-6 days. The amount of DSS consumed was not significantly different between WT and Gli1+/− animals (data not shown). Gli1+/− animals tended to weigh more than their WT littermates (mean=28 g for Gli1+/− animals and 24 g for WT animals). Therefore, DSS-treated weight matched WT C57B1/6 animals (n=4) were also tested along with Gli1+/− animals and WT littermates. No differences were evident between WT littermates and weight matched C57B1/6. All animals were monitored daily for diarrhoea, bloody stool, and weight loss. Clinical scoring was as follows: 0=no symptoms, 1=diarrhoea, 2=bloody stool, 4=severe rectal bleeding and morbidity to the point of immobility/death. For histology, a segment of large intestine tissue of equal length and location for all animals was fixed overnight in 4% paraformaldehyde, dehydrated, infiltrated with paraffin, and sectioned at 5 μm. Slides were stained with hematoxylin/eosin and scored histologically by a gastrointestinal pathologist (HA) blinded to the source of the tissue.

[0529] Protein Mutagenesis and Luciferase Assay

[0530] GLI1 E1100 was amplified from Image Clone #3531657, and cloned into pCMVTag2b. GLI1 Q1100 was obtained by inducing a point mutation using the QuikChange II Site-Directed Mutagenesis Kit (Stratagene) following the manufacturer's protocol. Plasmids encoding 8xGli-Luciferase, m8x Gli-Luciferase (mutated Gli sites) and Gli2ΔN were gifts of Dr. Andrzej Dlugosz. 293T cells were plated in 12 well plates, transfected with 0.7 μg/well transcription factor, 0.4 m/well reporter plasmid, and 2 ng/well pRL-TK Renilla (Promega) and analyzed for luciferase expression 36 hours after transfection using the Dual-Luciferase Reporter Kit (Promega) following the manufacturer's protocol. Firefly luciferase expression was normalized by well to Renilla, and fold changes were calculated by comparing to 8xGli-Luciferase transfected alone.

[0531] Cytokine Expression QPCR Whole colonic mRNA was collected using Trizol, followed by RNA clean-up with DNase digestion using the RNeasy Mini Kit (Qiagen). cDNA was synthesized using the iScript cDNA synthesis kit (Biorad), and SybrGreen QPCR was performed on a Biorad iCycler machine. Expression levels were normalized to GAPDH, and statistical analysis was performed using the Student's T-test.

[0532] Statistical analysis. Haplotype frequencies of the tSNPs were inferred using the expectation-maximization algorithm and these used to test whether haplotype frequencies were different in cases and controls as implemented in the EH and PM programmes. The test statistic 2*(In(Lcase)+In(Lcontrol)−In(Lcase/Lcontrol)), which has a χ² distribution with n−1 degrees of freedom (where n=number of possible haplotypes) was calculated and empirical p values obtained by permuting the data 10,000 times. Haplotypes were examined using the Haploview programme v3.2 (www.hapmap.org). Individual SNP analysis was performed using χ² or Fisher's exact test, where appropriate, with twotailed p-values given and odds ratios (OR) presented with 95% confidence intervals (C.I.). The meta-analysis of SNP rs2228226 was performed using the Mantel-Haenszel method using a fixed effects model (R-software package). Details for calculation of false positive report probability are provided in supplementary methods. Expression profiles were analysed using Mann-Whitney U test and Kruskal-Wallis test, assuming a non-parametric distribution of all datasets (GraphPad Prism 4, GraphPad Software Inc.).

[0533] Results

[0534] Gene-wide variation in GLI1 is associated with IBD and attributable to a nonsynonymous SNP (rs2228226) in the Scottish population

[0535] Four multi-marker tagging single nucleotide polymorphisms (tSNPs; r²≧0.8) were identified (rs3817474, rs2228225, rs2228224, and rs2228226) to describe haplotypic variation of GLI1, detecting haplotypes of a frequency >1%. We genotyped these 4 tSNPs in a Scottish IBD population consisting of 474 UC and 335 CD cases, and 1364 well-matched healthy controls (Table 10). We then used a model-free analysis [Zhao et al. (2000) Hum Hered 50: 133-139] to test the association of GLI1 and IBD susceptibility. In the Scottish population, we demonstrate a highly significant association in IBD (p<0.0001) and UC (p<0.0001), and an association with CD of borderline significance (p=0.03). On analysis of individual estimated haplotype frequencies in Haploview, 3 common haplotypes were described (DATA NOT SHOWN). We confirmed that this effect was confined to the GLI1 gene by genotyping an additional 7 haplotypetagging SNPs, chosen from Phase II HapMap data, to tag neighbouring blocks, in 166 CD and 170 UC patients. This confirmed the presence of a GLI1 spanning haplotype block that did not extend into neighbouring genes (INHBE and ARHGAP9) (DATA NOT SHOWN).

[0536] Table 11 shows minor allelic frequencies for GLI1 non-synonymous SNP rs2228226 (tSNP4) in Scottish, English, and Swedish healthy controls (HC), inflammatory bowel disease (IBD), Crohn's disease (CD) and ulcerative colitis (UC).

TABLE 11

| | | | IBD | | | UC | | | CD | | |
|---|---|---|---|---|---|---|---|---|---|---|---|
| | HC | | | | p value | | | p value | | | p value |
| | N | % | N | % | OR (C.I.) | N | % | OR (C.I.) | N | % | OR (C.I.) |
| Scotland | 1374 | 30.3 | 884 | 34.8 | 0.0026 | 474 | 33.9 | 0.042 | 335 | 36.1 | 0.0053 |
| | | | | | 1.23 | | | 1.19 | | | 1.30 |
| | | | | | (1.07-1.40) | | | (1.01-1.39) | | | (1.08-1.55) |
| Cambridge | 589 | 26.4 | 1737 | 29.6 | 0.042 | 928 | 30.8 | 0.017 | 737 | 27.9 | 0.40 |
| | | | | | 1.17 (1.0-136) | | | 1.21 | | | 1.08 |
| | | | | | | | | (1.03-1.42) | | | (0.90-1.28) |
| Sweden | 281 | 30.6 | 493 | 35 | 0.27 | 288 | 34.4 | 0.43 | 205 | 35.9 | 0.24 |
| | | | | | 1.14 | | | 1.11 | | | 1.19 |
| | | | | | (0.90-1.45) | | | (0.90-1.45) | | | (0.90-1.58) |

[0537] Odds ratios and two-tailed p-values are given for x2 analysis of IBD vs. HC, UC vs. HC and CD vs. HC in each of these three populations. Meta-analysis of these data are presented in FIG. 1. Frequencies of estimated haplotypes in all three populations and the full genotype data for the Scottish population are detailed in supplementary materials (Supplemental Tables 1 and 2).

[0538] The association on haplotype testing and log-likelihood analysis was largely attributable to a non-synonymous SNP in exon 12 of GLI1 (rs2228226C→G; tSNP4). rs2228226 was associated with IBD (allelic frequency OR=1.23, C.I. 1.07-1.40, p=0.0026; homozygotes OR=1.56, C.I. 1.15-2.11, p=0.0047), CD (allelic frequency OR=1.30, C.I. 1.08-1.55, p=0.0053, homozygotes OR=1.79, C.I. 1.21-2.65, p=0.0048) and UC (allelic frequency OR=1.19, C.I. 1.01-1.39, p=0.04) (Table 11 and DATA NOT SHOWN). These data suggest an allele specific dose response with a greater odds ratio for homozygotes than heterozygote patients. Mutation screening of the GLI1 coding regions by direct sequencing failed to identify any novel SNPs. There was no association between 7 additional GLI1 variants from dbSNP and IBD (DATA NOT SHOWN).

[0539] Replication of GLI1 association in two independent North European IBD cohorts and meta-analysis. We then sought to replicate these findings in other populations. In a large IBD panel from Cambridge, England (n=928 UC, 737 CD, 83 indeterminate colitis and 589 HC) association with GLI1 was replicated by log-likelihood analysis in IBD (p=0.009) and UC (p<0.0001). rs2228226 was associated with IBD (OR 1.17, C.I. 1.00-1.36, p=0.042) and UC(OR 1.21, C.I. 1.03-1.42, p=0.017) but not CD in this population (Table 11). As in Scotland, there was no association with tSNPs1-3 (DATA NOT SHOWN). In the smaller Swedish cohort (n=770), there was a non-significant trend to association of rs2228226 with IBD (OR 1.14, C.I. 0.90-1.45) (Table 11).

[0540] FIG. 104 shows a meta-analysis, using the Mantel-Haenszel method with a fixed effects model on the IBD cases and healthy controls in Scotland, England and Sweden confirmed the association with rs2228226 (OR 1.194, C.I. 1.089-1.309, p=0.0002). The meta-analysis is of non-synonymous GLI1 SNP rs2228226 (tSNP4) in Scotland, Cambridge and Sweden using Mantel-Haenszel method (n=5352 individuals). There was no evidence of heterogeneity in the contribution of rs2228226 between the 3 cohorts (p=0.825). Recognising the current problem with the publication of false positive findings in genetic association studies we estimated the probability that the association with disease risk found in the meta-analysis of GLI1 SNP rs2228226 represents a true (rather than false positive) association by adopting the false positive report probability (FPRP) approach described by Wacholder et al. (2004) J Natl Cancer Inst 96: 434-442. This gives an estimated probability that these findings represent a true finding of at least 92% (FPRP<0.08). This method is designed to avoid overinterpretation of statistically significant findings that are not likely to signify a true positive but in our study gives clear support to our interpretation of these data.

[0541] The GLI1 variant encoded by rs2228226 is functionally deficient in activating GLI-responsive transcription in vitro rs2228226C→G is a mis-sense mutation in exon 12 of GLI1, encoding a change from glutamine to glutamic acid (Q1100E).

[0542] FIG. 105 shows Q1100E disrupts a conserved region of the GLI1 protein and reduces GLI1 transcriptional activity. A) Conservation of known functional domains in the Gli 1 protein. Previously described Sufu binding, DNA binding, and transactivation domains [Yoon et al. (1998) J Biol Chem 273: 3496-3501; 27 Kinzler et al. (1988) Nature 332:371-374; Kogerman et al. (1999) Nat Cell Biol 1: 312-319] are shown schematically. Amino acid conservation of each domain is represented numerically and by shading of the bar below the domain. Red boxes indicate regions known to regulate GLI1 protein stability [Huntzicker et al. (2006) Genes Dev 20: 276-281]. The conserved C-terminal domain that includes Q1100E is adjacent to a known transactivation domain. B) Alignment of the C-terminus of mammalian Gli1 proteins. This region (AA 1080-1106) is highly conserved in mammalian lineages. C, D) GLI1 Q1100 and E1100 have similar cellular localization in 293T cells. E) GLI1 E1100 is deficient in driving activation of the 8xGli-Luciferase reporter compared to GLI1 Q1100. Gli2ΔN is a strong activator of 8xGli-Luciferase and serves as a positive control for GLI1 activation. The m8xGli-Luciferase construct contains only mutant Gli binding sites and serves as a negative control. Data shown from 6 triplicate experiments done using two different plasmid preparations (N=18).

[0543] The mutation falls within a well conserved motif at the C-terminus of mammalian GLI1 proteins, near a recognized transactivation domain (FIG. 105a) [Yoon et al. (1998) J Biol Chem 273: 3496-3501]. The Q1100 residue is itself 100% conserved in all mammals examined (FIG. 105b). In order to evaluate the functional consequences of the Q1100E mutation, we transfected either GLI1 Q1100 or the variant GLI1 E1100 into 293T cells. No differences in level of expression or cellular localization were detected between these GLI1 variants; both proteins were readily detectable in the nucleus of transfected cells (FIG. 105c-d). We further evaluated the ability of each variant to activate the well-characterized GLI reporter 8xGli-Luciferase [Saitsu et al. (2005) Dev Dyn 232: 282-292]. We utilized GliΔ2N, a very strong activator of 8xGli-Luciferase, as a positive control for GLI1 transcriptional activity [Roessler et al. (2005) Hum Mol Genet. 14: 2181-2188]. While both GLI1 variants activated 8xGli-Luciferase above baseline, WT GLI1 Q1100 was two-fold more efficient as a transcriptional activator than the variant GLI1 E1100 (FIG. 105e).

[0544] Hedgehog pathway activity is dysregulated in colonic inflammation. We have previously reported that GLI1 expression is greater in the distal compared with the proximal colon in man [Noble et al. (2008) Gut. October; 57(10):1398-405. Epub 2008 Jun. 3].

[0545] FIG. 106 shows expression of hedgehog (HH) signalling components in the healthy human adult colon (HC) and ulcerative colitis (UC). A) Patched (PTCH), Hedgehog-interacting protein (HHIP), and GLI1 mRNA levels increase along the length of the healthy adult colon, from ascending colon (AC) to descending colon (DC) and sigmoid colon (SC). B) HH protein expression in terminally differentiated enterocytes at the luminal surface, is greater in the distal colon compared with the proximal. C) Quantitative analysis of mRNA levels of Indian hedgehog (IHH), PTCH, GLI1, and HHIP in UC compared with non-inflamed HC. To account for the gradients identified along the length of the healthy colon (a-b), the data from SC only are shown. QPCR data is presented for IHH as this gene was not present on the Agilent microarray chip. Disease specimens are sub-categorised into non-inflamed (N−1) and inflamed (I) tissues. There was no change in levels of DHH, PTCH2, GLI2, GLI3, SUFU or DISP1 in either UC or CD compared with HC, or in non-IBD inflammation (data not shown). Analysis of SHH mRNA demonstrated a mild increase in expression levels related to inflammation that is consistent with the known expression of SHH in inflammatory cells (data not shown) [Lowrey et al. (2002) J Immunol 169: 1869-1875].

[0546] Individual data points are plotted with horizontal lines representing the medians for each dataset. P-values presented are derived from Kruskal-Wallis test, comparing levels in AC, DC and SC, and from Mann-Whitney U-tests (UC vs. HC(N−1)).

[0547] Extended in silico analysis of this microarray dataset now demonstrates that mRNA transcripts of PTCH and HHIP, along with HH protein, mirror this expression gradient (FIG. 106a-b). GLI1, PTCH and HHIP are pathway response elements whose expression levels predict pathway activity. GLI1 (p=0.0003), PTCH (p=0.002), and HHIP (p=0.0003) were lower in inflamed UC compared with HC from equivalent location (FIG. 106c). IHH was lower in UC regardless of inflammation (p=0.02). GLI1 expression was lower in CD than HC (p=0.004) irrespective of inflammatory status (DATA NOT SHOWN), a noteworthy finding given that GLI1 variation was also associated with CD in Scotland. PTCH was lower in inflamed CD compared with non-inflamed CD and HC (p=0.007). GLI1 and PTCH were both lower in non-IBD inflammation versus HC (DATA NOT SHOWN). These data demonstrate overall down-regulation of HH pathway activity, including GLI1, PTCH, and HHIP, in areas of colonic inflammation.

[0548] Gli1+/− animals exhibit mortality and heightened morbidity in response to intestinal inflammation induced by 3% DSS treatment. In vitro analysis of the GLI1 1100E variant demonstrated a 50% deficiency in transactivation function compared to WT GLI1, and our genetic analysis demonstrates an allele-specific dosage response, suggesting that a moderate reduction in GLI1 function was sufficient to predispose to intestinal inflammatory disease. To specifically test this hypothesis, we treated Gli1+/− mice [Park et al. (2000) Development 127: 1593-1605], and their WT littermates with 3% DSS for 6 days to induce acute intestinal inflammation. Gli1+/− animals were rapidly and severely affected by DSS treatment.

[0549] FIG. 107 shows the results in which Gli1+/− animals show mortality, severe clinical symptoms, and profound weight loss after DSS treatment. A) WT animals are 100% viable over the 6 day treatment period (N=14). Nearly 50% of Gli1+/− animals (4/9) die in response to 3% DSS treatment for 6 days. B) Gli1+/− animals display markedly more severe symptoms than WT animals after 4 or 6 days of 3% DSS treatment. 1=diarrhoea, 2=bloody diarrhoea, 4=severe bleeding/death. Each dot represents an individual animal and the solid line shows the mean observation in each cohort. C) G/i/+/− animals (N=9) have lose weight more rapidly than their WT littermates (N=10). *=p<0.05

[0550] After 6 days, 4/9 had died, and 3 of the survivors demonstrated severe morbidity, with significant rectal bleeding and almost complete immobility (FIG. 107a). In contrast, no WT animals (N=14) died, all were mobile and showed less morbidity on days 5 and 6 after treatment. Gli1+/− animals developed bloody diarrhoea and significant weight loss by day 4, whereas WT animals did not develop clinical signs or measurable weight loss until day 6 (FIG. 107b-c).

[0551] Gli1+/− animals develop more severe colonic pathology than WT littermates in response to DSS treatment. We examined colonic tissue from Gli1+/− and WT animals taken after 4 and 6 days of DSS treatment. Gli1+/− animals developed severe tissue lesions more rapidly than WT.

[0552] FIG. 108 shows Gli1+/− animals demonstrate more severe intestinal inflammation than WT littermates in response to DSS treatment. A) WT animals (N=4) exhibit mild colonic inflammation but do not develop substantial epithelial or ulcerative inflammatory pathology within 4 days of DSS treatment. B) Gli1+/− animals (N=4) develop significant inflammatory infiltration, epithelial damage, and ulceration within 4 days of DSS treatment. C-D) Gli1+/− animals develop profound intestinal inflammation in response to 3% DSS treatment, with severe epithelial damage in long stretches of their colonic mucosa (N=9). E) Blinded histological scoring of colonic damage after 6 days of DSS treatment. Standard lengths of tissue from the mid colon and distal descending colon were scored in each animal. Gli1+/− animals (N=6) have more overall inflammatory foci and more long foci (10+ crypt units affected) than WT animals (N=6). Each dot represents the number of observed foci in an individual animal; the solid line shows the mean observation in each cohort. Red dots indicate the animals that were analyzed for cytokine expression. F) Resident mucosal myeloid cells respond directly to Hh signalling and express LacZ in the homeostatic colon of Gli1+/− animals. Arrows indicate cells with LacZ-positive nuclei and Cd11b membranes.

[0553] After 4 days, WT colons showed evidence of inflammatory change but with few destructive lesions FIG. 108a), while extensive inflammatory infiltration and destructive colonic ulcers were prominent in Gli1+/− mice (FIG. 108b). After 6 days, inflammation in surviving Gli1+/− animals was markedly more severe. The number (FIG. 108e), size and invasiveness of inflammatory lesions (FIG. 108c-e) were significantly greater in Gli1+/− animals. Taken together, these results demonstrate that the loss of a single Gli1 allele leads to increased sensitivity to DSS treatment as reflected by severe intestinal inflammatory pathology and obvious clinical signs.

[0554] Intestinal myeloid cells respond directly to HH signals. We have demonstrated that HH signalling is exclusively paracrine in murine intestine and colon [Madison et al. (2005) Development 132: 279-28914]. Here we confirm that Gli1 is expressed in inflammatory cells in mouse, utilizing G/i/+/lacZ animals, which allow Hh-responsive cells to be easily visualized [Park et al. (2000) Development 127: 1593-1605]. In resting adult colon, lamina propria resident CD11b-positive myeloid cells express LacZ and are therefore responding directly to Hh signals (FIG. 108e).

[0555] Gli1+/− animals have increased IL-23p19 and pro-inflammatory cytokine expression.

[0556] FIG. 109 shows cytokine analysis of Gli1+/− and WT mice after DSS treatments demonstrates robust pro-inflammatory cytokine activation. A) Cytokine expression in WT and Gli1+/− animals (N=4) after 6 days of 3% DSS treatment. Cytokine expression normalized to GAPDH is plotted on the Y-axis for Gli1+/− mice, and on the X-axis for WT animals. Gene expression levels that are changed in a statistically significant manner are shown with stars. The dotted diagonal trendline indicates identical expression levels between WT and Gli1+/− mice. B) Table showing the average cytokine expression, standard deviation, and fold change in Gli1+/− animals compared to WT controls (*=p<0.05). Several pro-inflammatory cytokines are upregulated in Gli1+/− animals, but anti-inflammatory cytokines are largely unchanged.

[0557] QPCR examination of cytokine expression on whole colonic tissue taken after 6 days of DSS confirms the histological and clinical data; Gli1+/− animals demonstrate very significant inflammation compared to WT (FIG. 109). We detect robust expression of TH1 cytokines, including IFNγ, in Gli1+/− animals, not surprising given the severity of the inflammation in these animals and the prominence of TH1 cells in DSS-induced colitis. We did not detect a significant difference in TGF13 and IL-10 between Gli1+/− and WT animals, suggesting that down-regulation of anti-inflammatory cytokines was not the primary mechanism of increased inflammation in this model. The most highly expressed cytokine in Gli1+/− animals was IL-23p19, which is known to drive differentiation of TH17 lymphocytes, key mediators of inflammation in several systems, including IBD [Hue et al. (2006) J Exp Med 203: 2473-2483; Yen et al. (2006) J Clin Invest 116: 1310-1316]. IL-12 and IL-17, cytokines closely associated with IL-23, were also upregulated in Gli1+/− animals. These data are particularly significant since the IL-23 pathway has recently been strongly implicated in IBD pathogenesis both in humans [Duerr et al. (2006) Science 314: 1461-1463] and mice [Yen et al. (2006) J Clin Invest 116: 1310-1316]. Our data provide a potential link between this key inflammatory pathway and the robust inflammation seen with reduced GLI1 dosage or function.

[0558] Discussion

[0559] The data presented here provide the first evidence that intact HH signalling is critical in the mammalian gut response to inflammatory challenge, and that reduced GLI1 function is implicated in IBD pathogenesis. We confirm that the HH signaling pathway is downregulated in colonic inflammation in man. We identify a specific GLI1 variant that is highly associated with UC/IBD, and demonstrate that the variant protein is functionally deficient as a transcriptional activator in vitro. Finally, we demonstrate that a 50% reduction in murine Gli1 results in a heightened intestinal inflammatory response to DSS with significant upregulation of the IL-23 pathway. Not only do these findings have clear implications for the understanding of IBD pathogenesis with potential for therapeutic intervention, they are the first clear description of a functional role for HH signalling and GLI1 in bowel inflammation. The inherited variation in the GLI1 gene that we have detected is associated with IBD and UC, in both Scotland and England, with findings for rs2228226 confirmed by meta-analysis of over 5000 individuals, with odds ratio of 1.19. Evidence for an effect in CD is seen in the present study, but the predominant effect is clearly related to UC. The magnitude of this association is entirely in line with the effect size noted in a number of recent studies of complex disease genetics, including CD, colo-rectal cancer [Tenesa et al. (2008) Nat Genet. 40: 631-637], and coeliac disease [Hunt et al. (2008) Nat Genet. 40: 395-402]. The level of significance attained satisfies suggested criteria of p<10⁻⁴-10⁻⁶ for gene-centric studies [Burton et al. (2007) Nat Genet. 39: 1329-1337; Thomas et al. (2004) J Natl Cancer Inst 96: 421-423]. The three Northern European populations studied have previously demonstrated similar contribution of other IBD susceptibility genes/loci, including NOD2 and IBDS [Gaya et al. (2006) Lancet 367: 1271-1284]. Whilst the minor allelic frequencies for this SNP are very similar in Scotland and Sweden (30.3% and 30.6%), they differ by 3.9% between Scotland and Cambridge (30.3% and 26.4%). This difference is in keeping with that noted for a number of SNPs analysed for population stratification in the recent WTCCC study [Wellcome Trust Case Control Consortium (2007) Nature 447: 661-678]. Whilst our resequencing efforts identify rs2228226 as the only coding variant associated with IBD, the haplotype analysis and log-likelihood analyses raise the possibility that other germ-line variants may also contribute to IBD risk. These need be explored formally—specifically the role of intronic variants, long-range promoter effects and/or copy number variation. In this context, several complex disease genes, including NOD2 [Hugot et al. (2001). Nature 411: 599-603; Ogura Y et al. (2001). Nature 411: 603-606], have multiple independent mutations conferring disease risk, some disease genes have no causative mutations within coding sequences (e.g. IRGM in CD [Parkes et al. Am J Hum Genet. 2000; 67:1605-16105]), and synonymous SNPs may be associated with functional effects [Kimchi-Sarfaty et al. (2007) Science 315: 525-528]. rs2228226C→G encodes a change from glutamine to glutamic acid (Q1100E). Our in vitro data demonstrates that GLI1 1100E is a subfunctional transcriptional activator compared to WT GLI1, though it is synthesized and localized appropriately. The Q1100E mutation causes a significant charge change in a conserved region directly adjacent to the known transactivation region of GLI1; this change could directly modify transactivation activity, disrupt the structure of the transactivation domain, or affect protein stabilization [Huntzicker et al. (2006) Genes Dev 20: 276-281] decreasing activity. Our data suggest that reductions in GLI1 activity or amount also produce a robust phenotype. Gli1+/− animals, which have only 50% of the WT level of Gli1, develop severe inflammation rapidly in response to moderate stimuli. These data, to our knowledge the first description of a phenotype for reduced Gli 1 function [Park et al. (2000) Development 127: 1593-1605], demonstrate the key role that a full complement of Hh response plays in protection from inflammatory disease. In addition, our in vitro data demonstrates that GLI1 E1100 is capable of activating some Gli response, suggesting that under homeostatic conditions, GLI1 E1100 could perform adequately. Similar to the situation in Gli1+/− animals, however, under conditions of inflammatory stress, GLI1 E1100 can only function at 50% of the level of WT GLI1. Whether the predisposition to inflammation in these systems is a direct result of lowered HH signal transduction within inflammatory cells or reflects the effect of lower HH signals on stromal target cells that, in turn, release signals that impact the integrity of the epithelial layer is not yet clear. Addressing this question will be a key avenue of future investigation. We have shown that the HH pathway may directly modify the innate immune response through signalling to myeloid target cells. This finding is in accordance with recent data demonstrating a crucial role for Hh signalling in myeloid cell maturation in the spleen [Varas et al., (2008) J Leukoc Biol June; 83(6):1476-83. Epub 2008 March 1123]. Interestingly, myeloid cell populations can differentially modify the intestinal inflammatory milieu through a significant impact on the IL-23/IL-17 pathway [Denning et al. (2007) Nat Immunol 8: 1086-1094]. Together, our findings demonstrating direct HH response by innate immune populations and increased IL-23 after DSS treatment in Gli1+/− animals suggest that HH signalling may normally promote a tolerogenic phenotype in mucosal myeloid cells; reduced HH signal transduction may instead trigger an inflammatory response in these cells.

[0560] In conclusion, we demonstrate here for the first time the altered expression of a developmental signalling pathway in IBD, opening up novel lines of investigation. Furthermore, we show that these effects are in part genetically determined, with evidence implicating GLI1 as an IBD2 gene, and identification of a specific variant with reduced transcriptional activity. The functional relevance of Gli1 is demonstrated by the severe intestinal inflammation that develops in the face of a 50% reduction in Gli 1 concentration in an established mouse model of colitis. Taken together, these data strongly argue for the importance of a robust HH pathway activation in the protective response of the intestinal mucosa to inflammatory stimuli. These findings have important implications for the pathogenesis of UC and potentially for other forms of chronic inflammation. [Lees et al. (2006) Gastroenterology 131: 1657-1658].

### Example 5

### IBD Gene Expression Profiles from Whole Blood Samples

[0561] Genome wide expression profiles from human endoscopic colonic biopsies have started to help dissect out the pathogenic inflammatory pathways at the cellular level in IBD (Noble C L et al. Gut, 2008 Jun. 3. [Epub ahead of print]). Whole blood genome wide expression profiles may complement conventional endoscopic techniques to help in the diagnosis of IBD- Crohn's disease (CD) and ulcerative colitis (UC). The aim of this study was to investigate whole blood gene expression profiles to try to differentiate patients with IBD- CD, UC, and controls (HC).

[0562] Patients. 21 UC, 19 CD, and 10 controls (HC) were studied. 2 of the UC patients were newly diagnosed, 15 had quiescent disease and 4 had active disease. In CD 1 new diagnosis, 11 quiescent disease and 7 active disease patients were investigated.

[0563] Methods. 41058 expression sequence tags (representing 33296 genes) were analyzed in 50 whole blood samples using the Agilent platform. Total RNA was extracted from the blood using the micro total RNA isolation from animal tissues protocol (Qiagen, Valencia, Calif.). A T7 RNA polymerase single round of linear amplification was carried out to incorporate Cyanine-3 and Cyanine-5 label into cRNA. The samples were hybridized for 18 hours at 60° C. with constant rotation. Microarrays were washed, dried and scanned on the Agilent scanner according to the manufacturer's protocol. Microarray image files were analysed using Agilent's Feature Extraction software version 7.5. The genes were normalized using the Stratagene Universal Human Reference.

[0564] Using clustering analysis with all the IBD and HC patients, and probes that had a > or < than 1.5 fold change in expression, HC patients were more prevalent on one side of the dendrogram 1/21 v 9/29 (p=0.02 OR 1.8) (data not shown). No difference was observed in the distribution of the CD and UC samples. When all of the IBD samples were compared to controls 493 sequences had a fold change of greater than 1.5 (1.7×10⁻⁴¹<p<0.01) and 595 sequences had a fold change of less than 1.5 (4.0×10⁻⁴⁰<p<0.01). When CD and UC were compared, 293 sequences had a fold change of greater than 1.5 (5.4×10⁻²⁷<p<0.01) and 301 sequences had a fold change of less than 1.5 (5.2×10⁻¹⁸<p<0.01).

[0565] By using a panel of 10 of the up regulated and down regulated genes sequences we were able to predict with a >90% sensitivity IBD samples from controls. Table 12 below lists 20 differentially regulated genes in IBD when compared to controls.

TABLE 12

| Sequence Name | Sequence Code | Fold Change | P-value |
|---|---|---|---|
| LOC342959 (AARDC5) | A_32_P30271 | 4.92527 | 8.62E−18 |
| A_24_P910246 | A_24_P910246 | 2.92405 | 1.41E−07 |
| (ATXN3L) | | | |
| LOC92552 (FSHR) | A_23_P361744 | 2.78494 | 4.12E−13 |
| PDGFRA | A_23_P332536 | 2.7178 | 0.00004 |
| TGFB3 | A_24_P373096 | 2.67234 | 5.89E−09 |
| KCTD8 | A_23_P94902 | 2.65574 | 0.00005 |
| TGM4 | A_23_P41241 | 2.64262 | 0.0005 |
| NYD-SP25 | A_24_P309216 | 2.62905 | 7.76E−15 |
| FLJ33651 | A_24_P306032 | 2.62873 | 0.0034 |
| EMX2OS | A_24_P892472 | 2.55683 | 0.00029 |
| WNT16 | A_23_P134601 | −2.96773 | 3.46E−10 |
| SPRED2 | A_24_P315535 | −2.97751 | 3.12E−16 |
| MGC50721 (C16orf65) | A_23_P412508 | −3.06148 | 0.0088 |
| C12orf2 | A_24_P78556 | −3.17916 | 0.0129 |
| MPDZ | A_23_P396328 | −3.19437 | 1.87E−40 |
| FARS2 | A_24_P456422 | −3.35391 | 0.00097 |
| CASP8 | A_24_P157087 | −3.41412 | 3.90E−09 |
| NT5E | A_24_P316430 | −3.63046 | 0 |
| TDGF3 | A_24_P179646 | −3.71928 | 7.31E−23 |
| BTNL3 | A_23_P158297 | −5.22514 | 2.09E−12 |

[0566] Whole blood genome wide expression signature provides a starting point for differentiating between patients with IBD and controls and this may provide complimentary diagnostic evidence of the diagnosis of IBD.

1. A method of diagnosing the presence of an inflammatory bowel disease (IBD) in a mammalian subject, comprising determining that the level of expression of a nucleic acid encoding a polypeptide shown as any one of SEQ ID NOS: 2, 4, 6, 8, 10, 12, 14, 16, 18, 20, 22, 24, 26, 28, 30, 32, 34, 36, 38, 40, 42, 44, 46, 48, 50, 52, 54, 56, 58, 60, 62, 64, 66, 68. 70, 72, 74, 76, 78, 80, 82, 84, 86, 88, 90, 92, 94, 96. 98, 100, 102, 104, 106, 110, 112, 114, 116, 118, 120, 122, 124, 126, 128, 130, 132, 134, 136, 138, 140, 142, 144, 146, 148, 150, 152, 154, 156, 158, 160, 162, 164, 166, 168, 170, 172, 194, 197, 199, 201, 203, 205, 207, and 230 in a test sample obtained from said subject is higher relative to the level of expression in a control, wherein said higher level of expression is indicative of the presence of an IBD in the subject from which the test sample was obtained.

2. (canceled)

3. The method of claim 1 wherein said mammalian subject is a human patient.

4. The method of claim 3 wherein evidence of said expression level is obtained by a method of gene expression profiling.

5. The method of claim 3 wherein said method is a PCR-based method.

6. The method of claim 4 wherein said expression levels are normalized relative to the expression levels of one or more reference genes, or their expression products.

7. The method of claim 1 comprising determining evidence of the expression levels of at least two of said genes, or their expression products.

8. The method of claim 1 comprising determining evidence of the expression levels of at least three of said genes, or their expression products.

9. The method of claim 1 comprising determining evidence of the expression levels of at least four of said genes, or their expression products.

10. The method of claim 1 comprising determining evidence of the expression levels of at least live of said genes, or their expression products.

11. The method of claim 1 further comprising the step of creating a report summarizing said IBD detection.

12. The method of claim 1, wherein said IBD is ulcerative colitis.

13. The method of claim 1, wherein said IBD is Crohn's disease.

14. The method of claim 1, wherein said IBD is ulcerative colitis and Crohn's disease.

15. The method of claim 1, wherein said test sample is from a colonic tissue biopsy.

16. The method of claim 15, wherein said biopsy is from a tissue selected from the group consisting of the terminal ileum, the ascending colon, the descending colon, and the sigmoid colon.

17. The method of claim 15, wherein said biopsy is from an inflamed colonic area.

18. The method of claim 15, wherein said biopsy is from a non-inflamed colonic area.

19. The method of claim 1, wherein said determining step is indicative of a recurrence of an IBD in said mammalian subject, and wherein said mammalian subject was previously diagnosed with an IBD and treated for said previously diagnosed IBD.

20. The method of claim 19, wherein said treatment comprised surgery.

21. The method of claim 1, wherein said determining step is indicative of a flare-up of said IBD in said mammalian subject.

22. A method of treating an inflammatory bowel disorder (IBD) in a mammalian subject in need thereof, the method comprising the steps of (a) determining that the level of expression of a nucleic acid encoding a polypeptide shown as any one of SEQ ID NOS: 2, 4, 6, 8, 10, 12, 14, 16, 18, 20, 22, 24, 26. 28, 30, 32, 34, 36, 38, 40, 42, 44, 46, 48, 50, 52, 54, 56, 58, 60, 62, 64, 66, 68, 70, 72, 74, 76, 78, 80, 82, 84, 86, 88, 90, 92, 94, 96, 98, 100, 102, 104, 106, 110, 112, 114, 116, 118, 120, 122, 124, 126, 128, 130, 132, 134, 136, 138, 140, 142, 144, 146, 148, 150, 152, 154, 156, 158, 160, 162, 164, 166, 168, 170, 172, 194, 197, 199, 201, 203, 205, 207, and 230 in a test sample obtained from said subject is higher relative to the level of expression in a control, wherein said higher level of expression is indicative of the presence of an IBD in the subject from which the test sample was obtained; and (b) administering to said subject an effective amount of an IBD therapeutic agent.

23. (canceled)

24. The method of claim 22 wherein said mammalian subject is a human patient.

25. The method of claim 24 wherein evidence of said expression level is obtained by a method of gene expression profiling.

26. The method of claim 24 wherein said method is a PCR-based method.

27. The method of claim 25 wherein said expression levels are normalized relative to the expression levels of one or more reference genes, or their expression products.

28. The method of claim 22 comprising determining evidence of the expression levels of at least two of said genes, or their expression products.

29. The method of claim 22 comprising determining evidence of the expression levels of at least three of said genes, or their expression products.

30. The method of claim 22 comprising determining evidence of the expression levels of at least four of said genes, or their expression products.

31. The method of claim 22 comprising determining evidence of the expression levels of at least live of said genes, or their expression products.

32. The method of claim 22 further comprising the step of creating a report summarizing said IBD detection.

33. The method of claim 22, wherein said IBD is ulcerative colitis.

34. The method of claim 22, wherein said IBD is Crohn's disease.

35. The method of claim 22 wherein said IBD is ulcerative colitis and Crohn's disease.

36. The method of claim 22 wherein said test sample is from a colonic tissue biopsy.

37. The method of claim 36, wherein said biopsy is from a tissue selected from the group consisting of the terminal ileum, the ascending colon, the descending colon, and the sigmoid colon.

38. The method of claim 36, wherein said biopsy is from an inflamed colonic area.

39. The method of claim 36, wherein said biopsy is from a non-inflamed colonic area.

40. The method of claim 22, wherein said determining step is indicative of a recurrence of an IBD in said mammalian subject, and wherein said mammalian subject was previously diagnosed with an IBD and treated for said previously diagnosed IBD.

41. The method of claim 40, wherein said treatment comprised surgery.

42. The method of claim 22, wherein said determining step is indicative of a flare-up of said IBD in said mammalian subject.

43. The method of claim 22, wherein said IBD therapeutic agent is an aminosalicylate.

44. The method of claim 22, wherein said IBD therapeutic agent is a corticosteroid.

45. The method of claim 22, wherein said IBD therapeutic agent is an immunosuppressive agent.

The application's sequence listing, which the Patent Office published only in electronic form, follows.

SEQUENCE LISTING (271 sequences)

SEQ ID NO: 1 - DNA, 475 bp, Homo sapiens
acacatctgctcctgctctctctcctccagcgaccctagccatgagaaccctcaccatcctcactgctgttctcctcgtggccctccaggccaaggctgagccactccaagctgaggatgatccactgcaggcaaaagcttatgaggctgatgcccaggagcagcgtggggcaaatgaccaggactttgccgtctcctttgcagaggatgcaagctcaagtcttagagctttgggctcaacaagggctttcacttgccattgcagaaggtcctgttattcaacagaatattcctatgggacctgcactgtcatgggtattaaccacagattctgctgcctctgagggatgagaacagagagaaatatattcataatttactttatgacctagaaggaaactgtcgtgtgtcccatacattgccatcaactttgtttcctcatctcaaataaagtcctttcagcaaaaaaaaaaaa

SEQ ID NO: 2 - protein, 100 aa, Homo sapiens
MRTLTILTAVLLVALQAKAEPLQAEDDPLQAKAYEADAQEQRGANDQDFAVSFAEDASSSLRALGSTRAFTCHCRRSCYSTEYSYGTCTVMGINHRFCCL

SEQ ID NO: 3 - DNA, 449 bp, Homo sapiens
atatccactcctgctctccctcctgcaggtgaccccagccatgaggaccatcgccatccttgctgccattctcctggtggccctgcaggcccaggctgagtcactccaggaaagagctgatgaggctacaacccagaagcagtctggggaagacaaccaggaccttgctatctcctttgcaggaaatggactctctgctcttagaacctcaggttctcaggcaagagccacctgctattgccgaaccggccgttgtgctacccgtgagtccctctccggggtgtgtgaaatcagtggccgcctctacagactctgctgtcgctgagcttcctagatagaaaccaaagcagtgcaagattcagttcaaggtcctgaaaaaagaaaaacattttactctgtgtaccttgtgtctttctaaatttctctctccaaaataaagttcaagcatt

SEQ ID NO: 4 - protein, 94 aa, Homo sapiens
MRTIAILAAILLVALQAQAESLQERADEATTQKQSGEDNQDLAISFAGNGLSALRTSGSQARATCYCRTGRCATRESLSGVCEISGRLYRLCCR

SEQ ID NO: 5 - DNA, 1726 bp, Homo sapiens
gtcaggttcatggttacgaagctgctgaccccaggatcccagcccgtgggagagaagggggtctctgacagcccccacccctccccactgccagatccttattgggtctgagtttcaggggtggggccccagctggaggttataaaacagctcaatcggggagtacaaccttcggtttctcttcggggaaagctgctttcagcgcacacgggaagatatcagaaacatcctaggatcaggacaccccagatcttctcaactggaaccacgaaggctgtttcttccacacagcactttgatctccatttaagcaggcacctctgtcctgcgttccggagctgcgttcccgatggtcctcctttggctcacgctgctcctgatcgccctgccctgtctcctgcaaacgaaggaagatccaaacccaccaatcacgaacctaaggatgaaagcaaaggctcagcagttgacctgggaccttaacagaaatgtgaccgatatcgagtgtgttaaagacgccgactattctatgccggcagtgaacaatagctattgccagtttggagcaatttccttatgtgaagtgaccaactacaccgtccgagtggccaacccaccattctccacgtggatcctcttccctgagaacagtgggaagccttgggcaggtgcggagaatctgacctgctggattcatgacgtggatttcttgagctgcagctgggcggtaggcccgggggcccccgcggacgtccagtacgacctgtacttgaacgttgccaacaggcgtcaacagtacgagtgtcttcactacaaaacggatgctcagggaacacgtatcgggtgtcgtttcgatgacatctctcgactctccagcggttctcaaagttcccacatcctggtgcggggcaggagcgcagccttcggtatcccctgcacagataagtttgtcgtcttttcacagattgagatattaactccacccaacatgactgcaaagtgtaataagacacattcctttatgcactggaaaatgagaagtcatttcaatcgcaaatttcgctatgagcttcagatacaaaagagaatgcagcctgtaatcacagaacaggtcagagacagaacctccttccagctactcaatcctggaacgtacacagtacaaataagagcccgggaaagagtgtatgaattcttgagcgcctggagcaccccccagcgcttcgagtgcgaccaggaggagggcgcaaacacacgtgcctggcggacgtcgctgctgatcgcgctggggacgctgctggccctggtctgtgtcttcgtgatctgcagaaggtatctggtgatgcagagactctttccccgcatccctcacatgaaagaccccatcggtgacagcttccaaaacgacaagctggtggtctgggaggcgggcaaagccggcctggaggagtgtctggtgactgaagtacaggtcgtgcagaaaacttgagactggggttcagggcttgtgggggtctgcctcaatctccctggccgggccaggcgcctgcacagactggctgctggacctgcgcacgcagcccaggaatggacattcctaacgggtggtgggcatgggagatgcctgtgtaatttcgtccgaagctgccaggaagaagaacagaactttgtgtgtttatttcatgataaagtgatttttttttttttaacccaaaaaaaaaaaaaaaaa

SEQ ID NO: 6 - protein, 378 aa, Homo sapiens
MVLLWLTLLLIALPCLLQTKEDPNPPITNLRMKAKAQQLTWDLNRNVTDIECVKDADYSMPAVNNSYCQFGAISLCEVTNYTVRVANPPFSTWILFPENSGKPWAGAENLTCWIHDVDFLSCSWAVGPGAPADVQYDLYLNVANRRQQYECLHYKTDAQGTRIGCRFDDISRLSSGSQSSHILVRGRSAAFGIPCTDKFVVFSQIEILTPPNMTAKCNKTHSFMHWKMRSHFNRKFRYELQIQKRMQPVITEQVRDRTSFQLLNPGTYTVQIRARERVYEFLSAWSTPQRFECDQEEGANTRAWRTSLLIALGTLLALVCVFVICRRYLVMQRLFPRIPHMKDPIGDSFQNDKLVVWEAGKAGLEECLVTEVQVVQKT

SEQ ID NO: 7 - DNA, 2308 bp, Homo sapiens
gagagactggatggacccacaagggtgacagcccaggcggaccgatcttcccatcccacatcctccggcgcgatgccaaaaagaggctgacggcaactgggccttctgcagagaaagacctccgcttcactgccccggctggtcccaagggtcaggaagatggattcatacctgctgatgtggggactgctcacgttcatcatggtgcctggctgccaggcagagctctgtgacgatgacccgccagagatcccacacgccacattcaaagccatggcctacaaggaaggaaccatgttgaactgtgaatgcaagagaggtttccgcagaataaaaagcgggtcactctatatgctctgtacaggaaactctagccactcgtcctgggacaaccaatgtcaatgcacaagctctgccactcggaacacaacgaaacaagtgacacctcaacctgaagaacagaaagaaaggaaaaccacagaaatgcaaagtccaatgcagccagtggaccaagcgagccttccaggtcactgcagggaacctccaccatgggaaaatgaagccacagagagaatttatcatttcgtggtggggcagatggtttattatcagtgcgtccagggatacagggctctacacagaggtcctgctgagagcgtctgcaaaatgacccacgggaagacaaggtggacccagccccagctcatatgcacaggtgaaatggagaccagtcagtttccaggtgaagagaagcctcaggcaagccccgaaggccgtcctgagagtgagacttcctgcctcgtcacaacaacagattttcaaatacagacagaaatggctgcaaccatggagacgtccatatttacaacagagtaccaggtagcagtggccggctgtgttttcctgctgatcagcgtcctcctcctgagtgggctcacctggcagcggagacagaggaagagtagaagaacaatctagaaaaccaaaagaacaagaatttcttggtaagaagccgggaacagacaacagaagtcatgaagcccaagtgaaatcaaaggtgctaaatggtcgcccaggagacatccgttgtgcttgcctgcgttttggaagctctgaagtcacatcacaggacacggggcagtggcaaccttgtctctatgccagctcagtcccatcagagagcgagcgctacccacttctaaatagcaatttcgccgttgaagaggaagggcaaaaccactagaactctccatcttattttcatgtatatgtgttcattaaagcatgaatggtatggaactctctccaccctatatgtagtataaagaaaagtaggtttacattcatctcattccaacttcccagttcaggagtcccaaggaaagccccagcactaacgtaaatacacaacacacacactctaccctatacaactggacattgtctgcgtggttcctttctcagccgcttctgactgctgattctcccgttcacgttgcctaataaacatccttcaagaactctgggctgctacccagaaatcattttacccttggctcaatcctctaagctaacccccttctactgagccttcagtcttgaatttctaaaaaacagaggccatggcagaataatctttgggtaacttcaaaacggggcagccaaacccatgaggcaatgtcaggaacagaaggatgaatgaggtcccaggcagagaatcatacttagcaaagttttacctgtgcgttactaattggcctctttaagagttagtttctttgggattgctatgaatgataccctgaatttggcctgcactaatttgatgtttacaggtggacacacaaggtgcaaatcaatgcgtacgtttcctgagaagtgtctaaaaacaccaaaaagggatccgtacattcaatgtttatgcaaggaaggaaagaaagaaggaagtgaagagggagaagggatggaggtcacactggtagaacgtaaccacggaaaagagcgcatcaggcctggcacggtggctcaggcctataaccccagctccctaggagaccaaggcgggagcatctcttgaggccaggagtttgagaccagcctgggcagcatagcaagacacatccctacaaaaaattagaaattggctggatgtggtggcatacgcctgtagtcctagccactcaggaggctgaggcaggaggattgcttgagcccaggagttcgaggctgcagtcagtcatgatggcaccactgcactccagcctgggcaacagagcaagatcctgtctttaaggaaaaaaagacaagg

SEQ ID NO: 8 - protein, 272 aa, Homo sapiens
MDSYLLMWGLLTFIMVPGCQAELCDDDPPEIPHATFKAMAYKEGTMLNCECKRGFRRIKSGSLYMLCTGNSSHSSWDNQCQCTSSATRNTTKQVTPQPEEQKERKTTEMQSPMQPVDQASLPGHCREPPPWENEATERIYHFVVGQMVYYQCVQGYRALHRGPAESVCKMTHGKTRWTQPQLICTGEMETSQFPGEEKPQASPEGRPESETSCLVTTTDFQIQTEMAATMETSIFTTEYQVAVAGCVFLLISVLLLSGLTWQRRQRKSRRTI

SEQ ID NO: 9 - DNA, 807 bp, Homo sapiens
aaaccataccatatcccaccagagagtgactcctgattgcctcctcaagtcgcagacactatgctgcctcccatggccctgcccagtgtatcttggatgctgctttcctgcctcatgctgctgtctcaggttcaaggtgaagaaccccagagggaactgccctctgcacggatccgctgtcccaaaggctccaaggcctatggctcccactgctatgccttgtttttgtcaccaaaatcctggacagatgcagatctggcctgccagaagcggccctctggaaacctggtgtctgtgctcagtggggctgagggatccttcgtgtcctccctggtgaagagcattggtaacagctactcatacgtctggattgggctccatgaccccacacagggcaccgagcccaatggagaaggttgggagtggagtagcagtgatgtgatgaattactttgcatgggagagaaatccctccaccatctcaagccccggccactgtgcgagcctgtcgagaagcacagcatttctgaggtggaaagattataactgtaatgtgaggttaccctatgtctgcaagttcactgactagtgcaggagggaagtcagcagcctgtgtttggtgtgcaactcatcatgggcatgagaccagtgtgaggactcaccctggaagagaatattcgcttaattcccccaacctgaccacctcattcttatctttcttctgtttcttcctccccgctgtcatttcagtctcttcattttgtcatacggcctaaggctttaaagagcaataaaatttttagtctgc

SEQ ID NO: 10 - protein, 175 aa, Homo sapiens
MLPPMALPSVSWMLLSCLMLLSQVQGEEPQRELPSARIRCPKGSKAYGSHCYALFLSPKSWTDADLACQKRPSGNLVSVLSGAEGSFVSSLVKSIGNSYSYVWIGLHDPTQGTEPNGEGWEWSSSDVMNYFAWERNPSTISSPGHCASLSRSTAFLRWKDYNCNVRLPYVCKFTD

SEQ ID NO: 11 - DNA, 773 bp, Homo sapiens
aagccacctcaagtggacaaggcacttaccaacagagattgctgatttgctccttaagcaagagattcactgccgctaagcatggctcagaccaactcgttcttcatgctgatctcctccctgatgttcctgtctctgagccaaggccaggagtcccagacagagctgcctaatccccgaatcagctgcccagaaggcaccaatgcctatcgctcctactgctactactttaatgaagaccctgagacctgggttgatgcagatctctattgccagaacatgaattcaggcaacctggtgtctgtgctcacccaggcggagggtgccttcgtggcctcactgattaaggagagtagcactgatgacagcaatgtctggattggcctccatgacccaaaaaagaaccgccgctggcactggagtagtgggtccctggtctcctacaagtcctgggacactggatccccgagcagtgctaatgctggctactgtgcaagcctgacttcatgctcaggattcaagaaatggaaggatgaatcttgtgagaagaagttctcctttgtttgcaagttcaaaaactagaggaagctgaaaaatggatgtctagaactggtcctgcaattactatgaagtcaaaaattaaactagactatgtctccaactcagttcagaccatctcctccctaatgagtttgcatcgctgatcttcagtaccttcacctgtctcagtctctagagccctgaaaaataaaaacaaacttatttttatccag

SEQ ID NO: 12 - protein, 166 aa, Homo sapiens
MAQTNSFFMLISSLMFLSLSQGQESQTELPNPRISCPEGTNAYRSYCYYFNEDPETWVDADLYCQNMNSGNLVSVLTQAEGAFVASLIKESSTDDSNVWIGLHDPKKNRRWHWSSGSLVSYKSWDTGSPSSANAGYCASLTSCSGFKKWKDESCEKKFSFVCKFKN

SEQ ID NO: 13 - DNA, 2693 bp, Homo sapiens
ggagagaaatggctgaaagtggaaacccggagcggtttggggcgcttcgcaaagttctccagctcggcgagccggcggtgtgtctaccagaggctgggggccagtccatctggtcctgcccgacgccacttccaccccgcgagctctgggaaaggtctctacgtgacgccaagggccgtcgcggccccggggagagggatcgaaagactcactctgcgaggtgtttacactggaggtgggggacgggaagggactgggcaaagttacctggactcaactaaattcctgcgcttgcttagtgttgacatttgaataggatccgagatgttctgcttttatcccgggcagccctgatatgtcagcaacaggctgaggttccagacctgaaatcgcactgcaagaaaaaggggtttgctgaactaactccaagctggtgtgcctagcgtccgcgcggctgccggcccaagagctggagtcaccatggcggccggagttgcggcctggctgccttttgcccgggctgcggccatcgggtggatgccggtggccaactgccccatgcccctggccccggccgacaagaacaagcggcaggatgagctgattgtcctcaacgtgagtgggcggaggttccagacctggaggaccacgctggagcgctacccggacaccctgctgggcagcacggagaaggagttcttcttcaacgaggacaccaaggagtacttcttcgaccgggaccccgaggtgttccgctgcgtgctcaacttctaccgcacggggaagctgcactacccgcgctacgagtgcatctctgcctacgacgacgagctggccttctacggcatcctcccggagatcatcggggactgctgctacgaggagtacaaggaccgcaagagggagaacgccgagcggctcatggacgacaacgactcggagaacaaccaggagtccatgccctcgctcagcttccgccagaccatgtggcgggccttcgagaacccccacaccagcacgctggccctggtcttctactacgtgactggcttcttcatcgctgtctcggtcatcaccaacgtggtggagacggtgccgtgcggcacggtcccgggcagcaaggagctgccgtgcggggagcgctactcggtggccttcttctgcctggacacggcgtgcgtcatgatcttcaccgtggagtacctcctgcggctcttcgcggctcccagccgctaccgcttcatccgcagcgtcatgagcatcatcgacgtggtggccatcatgccctactacatcggtctggtcatgaccaacaacgaggacgtgtccggcgccttcgtcacgctccgggtcttccgcgtcttcaggatcttcaagttttcccgccactcccagggcctgcggatcctgggctacacactgaagagctgtgcctccgaactgggctttcttctcttctccctcaccatggccatcatcatctttgccactgtgatgttttatgccgagaagggctcctcggccagcaagttcacaagcatccctgcctcgttttggtacaccattgtcaccatgaccacactggggtacggagacatggtgcctaagacgattgcagggaagatcttcggctccatctgctccttgagtggcgtcctggtcattgccctgccagtccctgtgattgtttccaactttagccggatttaccaccagaatcagagagctgataaacgcagggcacaaaagaaggcccgccttgccaggatccgtgtggccaaaacaggcagttcgaatgcatacctgcacagcaagcgcaacgggctcctcaacgaggcgctggagctgacgggcaccccagaagaggagcacatgggcaagaccacctcactcatcgagagccagcatcatcacctgctgcactgcctggaaaaaaccactgggttgtcctatcttgtggatgatcccctgttatctgtacgaacctccaccatcaagaaccacgagtttattgatgagcagatgtttgagcagaactgcatggagagttcaatgcagaactacccatccacaagaagtccctcactgtccagccacccaggcctcactaccacctgctgctcccgtcgtagtaagaagaccacacacctgcccaattctaacctgccagctactcgcctgcgcagcatgcaagagctcagcacgatccacatccagggcagtgagcagccctccctcacaaccagtcgctccagccttaatttgaaagcagacgacggactgagaccaaactgcaaaacatcccagatcaccacagccatcatcagcatccccactcccccagcgctaaccccagagggggaaagtcggccaccccctgccagcccaggccccaacacgaacattccttccatagccagcaatgttgtcaaggtctccgccttgtaaaaccactggacagagggccagagtgggtagtggggaatgaaggggactggcatgttggtgggtggtcactgagaccactccctcccccctttccccactatttctgcctgccccattgtacccctagcactgagacttgtgcctggaaggaaaaagaggtagcaaaggggcacctgaggttcacgctgctagcgtggacatagccctgtgatactgcatctcactggggccagaggaagggaggg

SEQ ID NO: 14 - protein, 655 aa, Homo sapiens
MAAGVAAWLPFARAAAIGWMPVANCPMPLAPADKNKRQDELIVLNVSGRRFQTWRTTLERYPDTLLGSTEKEFFFNEDTKEYFFDRDPEVFRCVLNFYRTGKLHYPRYECISAYDDELAFYGILPEIIGDCCYEEYKDRKRENAERLMDDNDSENNQESMPSLSFRQTMWRAFENPHTSTLALVFYYVTGFFIAVSVITNVVETVPCGTVPGSKELPCGERYSVAFFCLDTACVMIFTVEYLLRLFAAPSRYRFIRSVMSIIDVVAIMPYYIGLVMTNNEDVSGAFVTLRVFRVFRIFKFSRHSQGLRILGYTLKSCASELGFLLFSLTMAIIIFATVMFYAEKGSSASKFTSIPASFWYTIVTMTTLGYGDMVPKTIAGKIFGSICSLSGVLVIALPVPVIVSNFSRIYHQNQRADKRRAQKKARLARIRVAKTGSSNAYLHSKRNGLLNEALELTGTPEEEHMGKTTSLIESQHHHLLHCLEKTTGLSYLVDDPLLSVRTSTIKNHEFIDEQMFEQNCMESSMQNYPSTRSPSLSSHPGLTTTCCSRRSKKTTHLPNSNLPATRLRSMQELSTIHIQGSEQPSLTTSRSSLNLKADDGLRPNCKTSQITTAIISIPTPPALTPEGESRPPPASPGPNTNIPSIASNVVKVSAL

SEQ ID NO: 15 - DNA, 799 bp, Homo sapiens
cactcccaaagaactgggtactcaacactgagcagatctgttctttgagctaaaaaccatgtgctgtaccaagagtttgctcctggctgctttgatgtcagtgctgctactccacctctgcggcgaatcagaagcagcaagcaactttgactgctgtcttggatacacagaccgtattcttcatcctaaatttattgtgggcttcacacggcagctggccaatgaaggctgtgacatcaatgctatcatctttcacacaaagaaaaagttgtctgtgtgcgcaaatccaaaacagacttgggtgaaatatattgtgcgtctcctcagtaaaaaagtcaagaacatgtaaaaactgtggcttttctggaatggaattggacatagcccaagaacagaaagaaccttgctggggttggaggtttcacttgcacatcatggagggtttagtgcttatctaatttgtgcctcactggacttgtccaattaatgaagttgattcatattgcatcatagtttgctttgtttaagcatcacattaaagttaaactgtattttatgttatttatagctgtaggttttctgtgtttagctatttaatactaattttccataagctattttggtttagtgcaaagtataaaattatatttgggggggaataagattatatggactttcttgcaagcaacaagctattttttaaaaaaactatttaacattcttttgtttatattgttttgtctcctaaattgttgtaattgcattataaaataagaaaaacattaataagacaaatatt

SEQ ID NO: 16 - protein, 96 aa, Homo sapiens
MCCTKSLLLAALMSVLLLHLCGESEAASNFDCCLGYTDRILHPKFIVGFTRQLANEGCDINAIIFHTKKKLSVCANPKQTWVKYIVRLLSKKVKNM

SEQ ID NO: 17 - DNA, 970 bp, Homo sapiens
gaagcgggaaagggccacaatggggtctgggaggtgggcggggcggagcggggatgtccagccacgtcgctttgttttcccacgctaggagctaccacaacaggtgctgcgagccgtaagcgccccccacccgcgctatgggctcggacgcctgggtgggcctttggcggccacaccggccccgcggccccatcgcggcgcactacggaggccccgggcccaaatacaagctgccgcccaacaccggctacgccctgcatgacccgtcgcggccgcgcgcccccgccttcaccttcggcgcgcgcttccccacgcagcagacgacgtgcggccccgggccaggccacctggtgcccgctcgcatgaccgtgcgcggcaccgacggcgcccccgcctactccatctacggccgcccacgccgctcagcgcccttcctcactccgggacctggcaggtacttcccggagcgagcggggaacgcgacgtaccccagtgcgcctcggcacaccattgctccccgaaactggggtgtccaggcggaacagcagagcccaggtcccgcggcctatacggtgccctcgctcttgggtccgcgcgtcatcggcaaagtctccgccccaacttgctccatctacggccgcagagcggctggcagtttcttcgaggacctcagcaagaccccgggcccctgcgcctatcaggtcgtgagtccaggggtctacaagtcccgggccccccagttcacgattctggcgcggacttcgctcccccaagacaacactcggaagccagggcccgcggcctacaacgtggatcagcaccggaagccccgcggctggagtttcgggatccggcactcggactacctggccccgctggtgaccgacgcggacaactgacccgccaggcgggagcggccccacacgtgtttgcttaaagtctgcgagtccgcaaaaaaaaaaaaaaaaaa

SEQ ID NO: 18 - protein, 253 aa, Homo sapiens
MGSDAWVGLWRPHRPRGPIAAHYGGPGPKYKLPPNTGYALHDPSRPRAPAFTFGARFPTQQTTCGPGPGHLVPARMTVRGTDGAPAYSIYGRPRRSAPFLTPGPGRYFPERAGNATYPSAPRHTIAPRNWGVQAEQQSPGPAAYTVPSLLGPRVIGKVSAPTCSIYGRRAAGSFFEDLSKTPGPCAYQVVSPGVYKSRAPQFTILARTSLPQDNTRKPGPAAYNVDQHRKPRGWSFGIRHSDYLAPLVTDADN

SEQ ID NO: 19 - DNA, 1498 bp, Homo sapiens
accaaacctcttcgaggcacaaggcacaacaggctgctctgggattctcttcagccaatcttcattgctcaagtgtctgaagcagccatggcagaagtacctgagctcgccagtgaaatgatggcttattacagtggcaatgaggatgacttgttctttgaagctgatggccctaaacagatgaagtgctccttccaggacctggacctctgccctctggatggcggcatccagctacgaatctccgaccaccactacagcaagggcttcaggcaggccgcgtcagttgttgtggccatggacaagctgaggaagatgctggttccctgcccacagaccttccaggagaatgacctgagcaccttctttcccttcatctttgaagaagaacctatcttcttcgacacatgggataacgaggcttatgtgcacgatgcacctgtacgatcactgaactgcacgctccgggactcacagcaaaaaagcttggtgatgtctggtccatatgaactgaaagctctccacctccagggacaggatatggagcaacaagtggtgttctccatgtcctttgtacaaggagaagaaagtaatgacaaaatacctgtggccttgggcctcaaggaaaagaatctgtacctgtcctgcgtgttgaaagatgataagcccactctacagctggagagtgtagatcccaaaaattacccaaagaagaagatggaaaagcgatttgtcttcaacaagatagaaatcaataacaagctggaatttgagtctgcccagttccccaactggtacatcagcacctctcaagcagaaaacatgcccgtcttcctgggagggaccaaaggcggccaggatataactgacttcaccatgcaatttgtgtcttcctaaagagagctgtacccagagagtcctgtgctgaatgtggactcaatccctagggctggcagaaagggaacagaaaggtttttgagtacggctatagcctggactttcctgttgtctacaccaatgcccaactgcctgccttagggtagtgctaagaggatctcctgtccatcagccaggacagtcagctctctcctttcagggccaatccccagcccttttgttgagccaggcctctctcacctctcctactcacttaaagcccgcctgacagaaaccacggccacatttggttctaagaaaccctctgtcattcgctcccacattctgatgagcaaccgcttccctatttatttatttatttgtttgtttgttttattcattggtctaatttattcaaagggggcaagaagtagcagtgtctgtaaaagagcctagtttttaatagctatggaatcaattcaatttggactggtgtgctctctttaaatcaagtcctttaattaagactgaaaatatataagctcagattatttaaatgggaatatttataaatgagcaaatatcatactgttcaatggttctgaaataaacttcactgaag

SEQ ID NO: 20 - protein, 269 aa, Homo sapiens
MAEVPELASEMMAYYSGNEDDLFFEADGPKQMKCSFQDLDLCPLDGGIQLRISDHHYSKGFRQAASVVVAMDKLRKMLVPCPQTFQENDLSTFFPFIFEEEPIFFDTWDNEAYVHDAPVRSLNCTLRDSQQKSLVMSGPYELKALHLQGQDMEQQVVFSMSFVQGEESNDKIPVALGLKEKNLYLSCVLKDDKPTLQLESVDPKNYPKKKMEKRFVFNKIEINNKLEFESAQFPNWYISTSQAENMPVFLGGTKGGQDITDFTMQFVSS

SEQ ID NO: 21 - DNA, 1103 bp, Homo sapiens
cacagagcccgggccgcaggcacctcctcgccagctcttccgctcctctcacagccgccagacccgcctgctgagccccatggcccgcgctgctctctccgccgcccccagcaatccccggctcctgcgagtggcactgctgctcctgctcctggtagccgctggccggcgcgcagcaggagcgtccgtggccactgaactgcgctgccagtgcttgcagaccctgcagggaattcaccccaagaacatccaaagtgtgaacgtgaagtcccccggaccccactgcgcccaaaccgaagtcatagccacactcaagaatgggcggaaagcttgcctcaatcctgcatcccccatagttaagaaaatcatcgaaaagatgctgaacagtgacaaatccaactgaccagaagggaggaggaagctcactggtggctgttcctgaaggaggccctgcccttataggaacagaagaggaaagagagacacagctgcagaggccacctggattgtgcctaatgtgtttgagcatcgcttaggagaagtcttctatttatttatttattcattagttttgaagattctatgttaatattttaggtgtaaaataattaagggtatgattaactctacctgcacactgtcctattatattcattctttttgaaatgtcaaccccaagttagttcaatctggattcatatttaatttgaaggtagaatgttttcaaatgttctccagtcattatgttaatatttctgaggagcctgcaacatgccagccactgtgatagaggctggcggatccaagcaaatggccaatgagatcattgtgaaggcaggggaatgtatgtgcacatctgttttgtaactgtttagatgaatgtcagttgttatttattgaaatgatttcacagtgtgtggtcaacatttctcatgttgaaactttaagaactaaaatgttctaaatatcccttggacattttatgtctttcttgtaaggcatactgccttgtttaatggtagttttacagtgtttctggcttagaacaaaggggcttaattattgatgttttcatagagaatataaaaataaagcacttatag

SEQ ID NO: 22 - protein, 107 aa, Homo sapiens
MARAALSAAPSNPRLLRVALLLLLLVAAGRRAAGASVATELRCQCLQTLQGIHPKNIQSVNVKSPGPHCAQTEVIATLKNGRKACLNPASPIVKKIIEKMLNSDKSN

SEQ ID NO: 23 - DNA, 1103 bp, Homo sapiens; identical to SEQ ID NO: 21

SEQ ID NO: 24 - protein, 107 aa, Homo sapiens; identical to SEQ ID NO: 22

SEQ ID NO: 25 - DNA, 5243 bp, Homo sapiens
agcgtgagactcgcgccctccggcacggaaaaggccaggcgacaggtgtcgcttgaaaagactgggcttgtccttgctggtgcatgcgtcgtcggcctctgggcagcaggtttacaaaggaggaaaacgacttcttctagatttttttttcagtttcttctataaatcaaaacatctcaaaatggagacctaaaatccttaaagggacttagtctaatctcgggaggtagttttgtgcatgggtaaacaaattaagtattaactggtgttttactatccaaagaatgctaattttataaacatgatcgagttatataaggtataccataatgagtttgattttgaatttgatttgtggaaataaaggaaaagtgattctagctggggcatattgttaaagcatttttttcagagttggccaggcagtctcctactggcacattctcccattatgtagaatagaaatagtacctgtgtttgggaaagattttaaaatgagtgacagttatttggaacaaagagctaataatcaatccactgcaaattaaagaaacatgcagatgaaagttttgacacattaaaatacttctacagtgacaaagaaaaatcaagaacaaagctttttgatatgtgcaacaaatttagaggaagtaaaaagataaatgtgatgattggtcaagaaattatccagttatttacaaggccactgatattttaaacgtccaaaagtttgtttaaatgggctgttaccgctgagaatgatgaggatgagaatgatggttgaaggttacattttaggaaatgaagaaacttagaaaattaatataaagacagtgatgaatacaaagaagatttttataacaatgtgtaaaatttttggccagggaaaggaatattgaagttagatacaattacttacctttgagggaaataattgttggtaatgagatgtgatgtttctcctgccacctggaaacaaagcattgaagtctgcagttgaaaagcccaacgtctgtgagatccaggaaaccatgcttgcaaaccactggtaaaaaaaaaaaaaaaaaaaaaaaaaagccacagtgacttgcttattggtcattgctagtattatcgactcagaacctctttactaatggctagtaaatcataattgagaaattctgaattttgacaaggtctctgctgttgaaatggtaaatttattattttttttgtcatgataaattctggttcaaggtatgctatccatgaaataatttctgaccaaaactaaattgatgcaatttgattatccatcttagcctacagatggcatctggtaacttttgactgttttaaaaaataaatccactatcagagtagatttgatgttggcttcagaaacatttagaaaaacaaaagttcaaaaatgttttcaggaggtgataagttgaataactctacaatgttagttctttgagggggacaaaaaatttaaaatctttgaaaggtcttattttacagccatatctaaattatcttaagaaaatttttaacaaagggaatgaaatatatatcatgattctgtttttccaaaagtaacctgaatatagcaatgaagttcagttttgttattggtagtttgggcagagtctctttttgcagcacctgttgtctaccataattacagaggacatttccatgttctagccaagtatactattagaataaaaaaacttaacattgagttgcttcaacagcatgaaactgagtccaaaagaccaaatgaacaaacacattaatctctgattatttattttaaatagaatatttaattgtgtaagatctaatagtatcattatacttaagcaatcatattcctgatgatctatgggaaataactattatttaattaatattgaaaccaggttttaagatgtgttagccagtcctgttactagtaaatctctttatttggagagaaattttagattgttttgttctccttattagaaggattgtagaaagaaaaaaatgactaattggagaaaaattggggatatatcatatttcactgaattcaaaatgtcttcagttgtaaatcttaccattattttacgtacctctaagaaataaaagtgcttctaattaaaatatgatgtcattaattatgaaatacttcttgataacagaagttttaaaatagccatcttagaatcagtgaaatatggtaatgtattattttcctcctttgagttaggtcttgtgcttttttttcctggccactaaatttcacaatttccaaaaagcaaaataaacatattctgaatatttttgctgtgaaacacttgacagcagagctttccaccatgaaaagaagcttcatgagtcacacattacatctttgggttgattgaatgccactgaaacattctagtagcctggagaagttgacctacctgtggagatgcctgccattaaatggcatcctgatggcttaatacacatcactcttctgtgaagggttttaattttcaacacagcttactctgtagcatcatgtttacattgtatgtataaagattatacaaaggtgcaattgtgtatttcttccttaaaatgtatcagtataggatttagaatctccatgttgaaactctaaatgcatagaaataaaaataataaaaaatttttcattttggcttttcagcctagtattaaaactgataaaagcaaagccatgcacaaaactacctccctagagaaaggctagtcccttttcttccccattcatttcattatgaacatagtagaaaacagcatattcttatcaaatttgatgaaaagcgccaacacgtttgaactgaaatacgacttgtcatgtgaactgtaccgaatgtctacgtattccacttttcctgctggggttcctgtctcagaaaggagtcttgctcgtgctggtttctattacactggtgtgaatgacaaggtcaaatgcttctgttgtggcctgatgctggataactggaaaagaggagacagtcctactgaaaagcataaaaagttgtatcctagctgcagattcgttcagagtctaaattccgttaacaacttggaagctacctctcagcctacttttccttcttcagtaacaaattccacacactcattacttccgggtacagaaaacagtggatatttccgtggctcttattcaaactctccatcaaatcctgtaaactccagagcaaatcaagatttttctgccttgatgagaagttcctaccactgtgcaatgaataacgaaaatgccagattacttacttttcagacatggccattgacttttctgtcgccaacagatctggcaaaagcaggcttttactacataggacctggagacagagtggcttgctttgcctgtggtggaaaattgagcaattgggaaccgaaggataatgctatgtcagaacacctgagacattttcccaaatgcccatttatagaaaatcagcttcaagacacttcaagatacacagtttctaatctgagcatgcagacacatgcagcccgctttaaaacattctttaactggccctctagtgttctagttaatcctgagcagcttgcaagtgcgggtttttattatgtgggtaacagtgatgatgtcaaatgcttttgctgtgatggtggactcaggtgttgggaatctggagatgatccatgggttcaacatgccaagtggtttccaaggtgtgagtacttgataagaattaaaggacaggagttcatccgtcaagttcaagccagttaccctcatctacttgaacagctgctatccacatcagacagcccaggagatgaaaatgcagagtcatcaattatccattttgaacctggagaagaccattcagaagatgcaatcatgatgaatactcctgtgattaatgctgccgtggaaatgggctttagtagaagcctggtaaaacagacagttcagagaaaaatcctagcaactggagagaattatagactagtcaatgatcttgtgttagacttactcaatgcagaagatgaaataagggaagaggagagagaaagagcaactgaggaaaaagaatcaaatgatttattattaatccggaagaatagaatggcactttttcaacatttgacttgtgtaattccaatcctggatagtctactaactgccggaattattaatgaacaagaacatgatgttattaaacagaagacacagacgtctttacaagcaagagaactgattgatacgattttagtaaaaggaaatattgcagccactgtattcagaaactctctgcaagaagctgaagctgtgttatatgagcatttatttgtgcaacaggacataaaatatattcccacagaagatgtttcagatctaccagtggaagaacaattgcggagactacaagaagaaagaacatgtaaagtgtgtatggacaaagaagtgtccatagtgtttattccttgtggtcatctagtagtatgcaaagattgtgctccttctttaagaaagtgtcctatttgtaggagtacaatcaagggtacagttcgtacatttctttcatgaagaagaaccaaaacatcgtctaaactttagaattaatttattaaatgtattataactttaacttttatcctaatttggtttccttaaaatttttatttatttacaactcaaaaaacattgttttgtgtaacatatttatatatgtatctaaaccatatgaacatatattttttagaaactaagagaatgataggcttttgttcttatgaacgaaaaagaggtagcactacaaacacaatattcaatcaaaatttcagcattattgaaattgtaagtgaagtaaaacttaagatatttgagttaacctttaagaattttaaatattttggcattgtactaataccgggaacatgaagccaggtgtggtggtatgtgcctgtagtcccaggctgaggcaagagaattacttgagcccaggagtttgaatccatcctgggcagcatactgagaccctgcctttaaaaacaaacagaacaaaaacaaaacaccagggacacatttctctgtcttttttgatcagtgtcctatacatcgaaggtgtgcatatatgttgaatgacattttagggacatggtgtttttataaagaattctgtgagaaaaaatttaataaagcaacaaaaattactcttaaaaaaaaaaaaaaa

SEQ ID NO: 26 - protein, 604 aa, Homo sapiens
MNIVENSIFLSNLMKSANTFELKYDLSCELYRMSTYSTFPAGVPVSERSLARAGFYYTGVNDKVKCFCCGLMLDNWKRGDSPTEKHKKLYPSCRFVQSLNSVNNLEATSQPTFPSSVTNSTHSLLPGTENSGYFRGSYSNSPSNPVNSRANQDFSALMRSSYHCAMNNENARLLTFQTWPLTFLSPTDLAKAGFYYIGPGDRVACFACGGKLSNWEPKDNAMSEHLRHFPKCPFIENQLQDTSRYTVSNLSMQTHAARFKTFFNWPSSVLVNPEQLASAGFYYVGNSDDVKCFCCDGGLRCWESGDDPWVQHAKWFPRCEYLIRIKGQEFIRQVQASYPHLLEQLLSTSDSPGDENAESSIIHFEPGEDHSEDAIMMNTPVINAAVEMGFSRSLVKQTVQRKILATGENYRLVNDLVLDLLNAEDEIREEERERATEEKESNDLLLIRKNRMALFQHLTCVIPILDSLLTAGIINEQEHDVIKQKTQTSLQARELIDTILVKGNIAATVFRNSLQEAEAVLYEHLFVQQDIKYIPTEDVSDLPVEEQLRRLQEERTCKVCMDKEVSIVFIPCGHLVVCKDCAPSLRKCPICRSTIKGTVRTFLS

SEQ ID NO: 27 - DNA, 1400 bp, Homo sapiens
cggcaaaaaaaaaaggcgtaagaattttgaagctatgttcaaaggtatccttcagagtggattggataacttcgtgataaaccacatgctaaagaacaacgtggctggacaaacatctatccagaccctagtacctaatacggatcaaaagtcgaccagtgtaaaaaaagacaaccacaaaaaaaaaacagttaagatgttggaatacctgggcaaagatgttcttcatggtgtttttaattatttggcaaaacacgatgttctgacattgaaggaagaggaaaagaaaaaatattatgatgccaaaattgaagacaaggccctgatcttggtagactctttgcgaaagaatcgcgtggctcatcaaatgtttacccaaacacttctcaatatggaccaaaagatcaccagtgtaaaacctcttctgcaaatcgaggctggaccacctgagtcagcagaatctacaaatatactcaaactttgtcctcgtgaagaattcctgagactgtgtaaaaaaaatcatgatgagatctatccaataaaaaagagagaggaccgcagacgcctggctctcatcatatgcaatacaaagtttgatcacctgcctgcaaggaatggggctcactatgacatcgtggggatgaaaaggctgcttcaaggcctgggctacactgtggttgacgaaaagaatctcacagccagggatatggagtcagtgctgagggcatttgctgccagaccagagcacaagtcctctgacagcacgttcttggtactcatgtctcatggcatcctagagggaatctgcggaactgcgcataaaaagaaaaaaccggatgtgctgctttatgacaccatcttccagatattcaacaaccgcaactgcctcagtctaaaggacaaacccaaggtcatcattgtccaggcctgcagaggtgaaaaacatggggaactctgggtcagagactctccagcatccttggcagtcatctcttcacagtcatctgagaacctggaggcagattctgtttgcaagatccacgaggagaaggacttcattgctttctgttcttcaacaccacataacgtgtcctggagagaccgcacaaggggctccatcttcattacggaactcatcacatgcttccagaaatattcttgctgctgccacctaatggaaatatttcggaaggtacagaaatcatttgaagttccacaggctaaagcccagatgcccaccatagaacgagcaaccttgacaagagatttctacctctttcctggcaattgaaaatgaaaccacaggcagcccagccctcctctgtcaacatcaaagagcacatttaccagtatagcttgcatagtcaatatttggtatttcaataaaagtaaagactgta

SEQ ID NO: 28 - protein, 418 aa, Homo sapiens
MFKGILQSGLDNFVINHMLKNNVAGQTSIQTLVPNTDQKSTSVKKDNHKKKTVKMLEYLGKDVLHGVFNYLAKHDVLTLKEEEKKKYYDAKIEDKALILVDSLRKNRVAHQMFTQTLLNMDQKITSVKPLLQIEAGPPESAESTNILKLCPREEFLRLCKKNHDEIYPIKKREDRRRLALIICNTKFDHLPARNGAHYDIVGMKRLLQGLGYTVVDEKNLTARDMESVLRAFAARPEHKSSDSTFLVLMSHGILEGICGTAHKKKKPDVLLYDTIFQIFNNRNCLSLKDKPKVIIVQACRGEKHGELWVRDSPASLAVISSQSSENLEADSVCKIHEEKDFIAFCSSTPHNVSWRDRTRGSIFITELITCFQKYSCCCHLMEIFRKVQKSFEVPQAKAQMPTIERATLTRDFYLFPGN

SEQ ID NO: 29 - DNA, 5802 bp, Homo sapiens
tttatagcagcagtagaaatataccaccctagaggacacacctccttttagctaggtacctataaatgtccaggattttctattcaattgagaagaacccagcaaaatggggatctccacagtcatccttgaaatgtgtcttttatggggacaagttctatctacaggtgggtggatcccaaggactacagactacgcttcactgattccctcggaggtgcccttggatccaactgtagcagaaggttctccatttccctcggagtcgaccctggagtcaactgtagcagaaggttctccgatttccttggagtcaaccctggagtcaaccgtagcagaaggttctctgattccctcagagtcaaccctggagtcaactgtagcagaaggatctgattctggtttggccctgaggctggtgaatggagatggcaggtgtcagggccgagtggagatcctataccgaggctcctggggcaccgtgtgtgatgacagctgggacaccaatgatgccaacgtggtctgtaggcagctgggttgtggctgggccatgtcagctccaggaaatgcctggtttggccagggctcaggacccattgccctggatgatgtgcgctgctcaggacacgaatcctacctgtggagctgcccccacaatggctggctctcccataactgtggccatggtgaagatgctggtgttatctgctcagctgcccagcctcagtcaacactcaggccagaaagttggcctgtcaggatatcaccacctgtacccacagaaggatctgaatccagtttggccctgaggctggtgaatggaggcgacaggtgtcgaggccgagtggaggtcctataccgaggctcctggggcaccgtgtgtgatgactactgggacaccaatgatgccaatgtggtctgcaggcagctgggctgtggctgggccatgtcagccccaggaaatgcccagtttggccagggctcaggacccattgtcctggatgatgtgcgctgctcaggacatgagtcctacctgtggagctgcccccacaatggctggctcacccacaactgtggccatagtgaagacgctggtgtcatctgctcagctccccagtcccggccgacacccagcccagatacttggccgacctcacatgcatcaacagcaggacctgaatccagtttggccctgaggctggtgaatggaggtgacaggtgtcagggccgagtggaggtcctataccgaggctcctggggcaccgtgtgtgatgatagctgggacaccagtgacgccaatgtggtctgccggcagctgggctgtggctgggccacgtcagccccaggaaatgcccggtttggccagggttcaggacccattgtcctggatgacgtgcgctgctcaggctatgagtcctacctgtggagctgcccccacaatggctggctctcccataactgtcagcacagtgaagacgctggtgtcatctgctcagctgcccactcctggtcgacgcccagtccagacacattgccgaccatcaccttgcctgcatcgacagtaggatctgaatccagtttggccctgaggctggtgaatggaggtgacaggtgtcagggccgagtggaggtcctataccaaggctcctggggcaccgtgtgcgatgacagctgggacaccaatgatgccaatgtcgtctgcaggcaactgggctgtggctgggccatgtcagccccaggaaatgcccggtttggtcagggctcaggacccattgtcctggatgatgtgcgctgctcaggacacgagtcttacctgtggagctgcccccacaatggctggctctcccacaactgtggccatagtgaagacgctggtgtcatctgctcagcttcccagtcccggccaacacctagtccagacacttggccaacctcacatgcatcaacagcaggatctgaatccagtttggccctgaggctggtgaatggaggtgacaggtgtcagggccgagtggaggtcctataccgaggctcctggggcaccgtgtgtgatgactactgggacaccaatgatgccaatgtggtttgcaggcagctgggctgtggctgggccatgtcagccccaggaaatgcccggtttggccagggttcaggacccattgtcctggatgatgtgcgctgctcaggacatgagtcctatctgtggagctgcccccacaatggctggctctcccacaactgtggccatcatgaagacgctggtgtcatctgctcagcttcccagtcccagccgacacccagcccagacacttggccaacctcacatgcatcaacagcaggatctgaatccagtttggccctgaggctggtgaatggaggtgacaggtgtcagggccgagtggaggtcctataccgaggctcctggggcaccgtgtgtgatgactactgggacaccaatgatgccaatgtggtttgcaggcagctgggctgtggctgggccacgtcagccccaggaaatgcccggtttggccagggttcaggacccattgtcctggatgatgtgcgctgctcaggacatgagtcctatctgtggagctgcccccacaatggctggctctcccacaactgtggccatcatgaagacgctggtgtcatctgctcagcttcccagtcccagccgacacccagcccagacacttggccaacctctcgtgcatcaacagcaggatctgaatccactttggccctgagactggtgaatggaggtgacaggtgtcgaggccgagtggaggtcctataccaaggctcctggggcaccgtgtgtgatgactactgggacaccaatgatgccaacgtggtctgcaggcagctgggctgtggctgggccatgtcagccccaggaaatgcccagtttggccagggctcaggacccattgtcctggatgatgtgcgctgctcaggacacgagtcttacctgtggagctgcccccacaatggctggctctcccacaactgtggccatcatgaagatgctggtgtcatctgctcagctgctcagtcccagtcaacgcccaggccagatacttggctgaccaccaacttaccggcattgacagtaggatctgaatccagtttggctctgaggctggtgaatggaggtgacaggtgtcgaggccgagtggaggtcctgtatcgaggctcctggggaaccgtgtgtgatgacagctgggacaccaatgatgccaatgtggtctgcaggcagctgggctgtggctgggccatgtcggccccaggaaatgcccggtttggccagggctcaggacccattgtcctggatgatgtgcgctgctcagggaatgagtcctacctgtggagctgcccccacaaaggctggctcacccacaactgtggccatcacgaagacgctggtgtcatctgctcagccacccaaataaattctactacgacagattggtggcatccaacaactacaaccactgcaagaccctcttcaaattgtggtggcttcttattctatgccagtgggacattctccagcccatcctaccctgcatactaccccaacaatgctaagtgtgtttgggaaatagaagtgaattctggttatcgcataaacctgggcttcagtaatctgaaattggaggcacaccataactgcagttttgattatgttgaaatctttgatggatcattgaatagcagtctcctgctggggaaaatctgtaatgataccaggcaaatatttacatcttcttacaaccgaatgaccattcactttcgaagtgacatcagtttccaaaacactggctttttggcttggtataactccttcccaagcgatgccaccttgaggttggtcaatttaaattcatcctatggtctatgtgccgggcgtgtagaaatttaccatggtggcacctgggggacagtttgtgatgactcctggaccattcaggaagctgaggtggtctgcagacagctagggtgtggacgtgcagtttcagcccttggaaatgcatattttggctctggctctggccccatcaccctggacgatgtagagtgctcagggacggaatccactctctggcagtgccggaaccgaggctggttctcccacaactgtaatcatcgtgaagatgctggtgtcatctgctcaggaaaccatctatcgacacctgctccttttctcaacatcacccgtccaaacacagattattcctgcggaggcttcctatcccaaccatcaggggacttttccagcccattctatcccgggaactatccaaacaatgccaagtgtgtgtgggacattgaggtgcaaaacaactaccgtgtgactgtgatcttcagagatgtccagcttgaaggtggctgcaactatgattatattgaagttttcgatggcccctaccgcagttcccctctcattgctcgagtttgtgatggggccagaggctccttcacttcttcctccaacttcatgtccattcgcttcatcagtgaccacagcatcacaaggagagggttccgggctgagtactactccagtccctccaatgacagcaccaacctgctctgtctgccaaatcacatgcaagccagtgtgagcaggagctatctccaatccttgggcttttctgccagtgaccttgtcatttccacctggaatggatactacgagtgtcggccccagataacgccgaacctggtgatattcacaattccctactcaggctgcggcaccttcaagcaggcagacaatgacaccatcgactattccaacttcctcacagcagctgtctcaggtggcatcatcaagaggaggacagacctccgtattcacgtcagctgcagaatgcttcagaacacctgggtcgacaccatgtacattgctaatgacaccatccacgttgctaataacaccatccaggtcgaggaagtccagtatggcaattttgacgtgaacatttccttttatacttcctcatctttcttgtatcctgtgaccagccgcccttactacgtggacctgaaccaggacttgtacgttcaggctgaaatcctccattctgatgctgtactgaccttgtttgtggacacctgcgtggcatcaccatactccaatgacttcacgtctttgacttatgatctaatccggagtggatgcgtgagggatgacacctacggaccctactcctcgccatctcttcgcattgcccgcttccggttcagggccttccacttcctgaaccgcttcccctccgtgtacctgcgttgtaaaatggtggtgtgcagagcgtatgacccctcttcccgctgctaccgaggctgtgtgttgaggtcgaagagggatgtgggctcctaccaggaaaaggtggacgtcgtcctgggtcccatccagctgcagacccccccacgccgagaagaggagcctcggtaggtggtcgctctcagaccccactgtccaccggggcgcagacccctgactcggggacttgggatgttcctcttggtgtcatattccaactcagattgagccctacattgtgctgcacctggtcatacggagttgaatcagacctggttcccgcctcccccaaggctcatggtccttggaggacccgttgcagggtgaggtcaagagagttctgacctggatggcccatagacctgacgtcccagaatccatgcttctcatctgcaaaatgaaaatgtcaatacttacttcttagcactgttgagagggttacttacataaaggaattttggtgaaactgc

SEQ ID NO: 30 - protein, 1785 aa, Homo sapiens
MGISTVILEMCLLWGQVLSTGGWIPRTTDYASLIPSEVPLDPTVAEGSPFPSESTLESTVAEGSPISLESTLESTVAEGSLIPSESTLESTVAEGSDSGLALRLVNGDGRCQGRVEILYRGSWGTVCDDSWDTNDANVVCRQLGCGWAMSAPGNAWFGQGSGPIALDDVRCSGHESYLWSCPHNGWLSHNCGHGEDAGVICSAAQPQSTLRPESWPVRISPPVPTEGSESSLALRLVNGGDRCRGRVEVLYRGSWGTVCDDYWDTNDANVVCRQLGCGWAMSAPGNAQFGQGSGPIVLDDVRCSGHESYLWSCPHNGWLTHNCGHSEDAGVICSAPQSRPTPSPDTWPTSHASTAGPESSLALRLVNGGDRCQGRVEVLYRGSWGTVCDDSWDTSDANVVCRQLGCGWATSAPGNARFGQGSGPIVLDDVRCSGYESYLWSCPHNGWLSHNCQHSEDAGVICSAAHSWSTPSPDTLPTITLPASTVGSESSLALRLVNGGDRCQGRVEVLYQGSWGTVCDDSWDTNDANVVCRQLGCGWAMSAPGNARFGQGSGPIVLDDVRCSGHESYLWSCPHNGWLSHNCGHSEDAGVICSASQSRPTPSPDTWPTSHASTAGSESSLALRLVNGGDRCQGRVEVLYRGSWGTVCDDYWDTNDANVVCRQLGCGWAMSAPGNARFGQGSGPIVLDDVRCSGHESYLWSCPHNGWLSHNCGHHEDAGVICSASQSQPTPSPDTWPTSHASTAGSESSLALRLVNGGDRCQGRVEVLYRGSWGTVCDDYWDTNDANVVCRQLGCGWATSAPGNARFGQGSGPIVLDDVRCSGHESYLWSCPHNGWLSHNCGHHEDAGVICSASQSQPTPSPDTWPTSRASTAGSESTLALRLVNGGDRCRGRVEVLYQGSWGTVCDDYWDTNDANVVCRQLGCGWAMSAPGNAQFGQGSGPIVLDDVRCSGHESYLWSCPHNGWLSHNCGHHEDAGVICSAAQSQSTPRPDTWLTTNLPALTVGSESSLALRLVNGGDRCRGRVEVLYRGSWGTVCDDSWDTNDANVVCRQLGCGWAMSAPGNARFGQGSGPIVLDDVRCSGNESYLWSCPHKGWLTHNCGHHEDAGVICSATQINSTTTDWWHPTTTTTARPSSNCGGFLFYASGTFSSPSYPAYYPNNAKCVWEIEVNSGYRINLGFSNLKLEAHHNCSFDYVEIFDGSLNSSLLLGKICNDTRQIFTSSYNRMTIHFRSDISFQNTGFLAWYNSFPSDATLRLVNLNSSYGLCAGRVEIYHGGTWGTVCDDSWTIQEAEVVCRQLGCGRAVSALGNAYFGSGSGPITLDDVECSGTESTLWQCRNRGWFSHNCNHREDAGVICSGNHLSTPAPFLNITRPNTDYSCGGFLSQPSGDFSSPFYPGNYPNNAKCVWDIEVQNNYRVTVIFRDVQLEGGCNYDYIEVFDGPYRSSPLIARVCDGARGSFTSSSNFMSIRFISDHSITRRGFRAEYYSSPSNDSTNLLCLPNHMQASVSRSYLQSLGFSASDLVISTWNGYYECRPQITPNLVIFTIPYSGCGTFKQADNDTIDYSNFLTAAVSGGIIKRRTDLRIHVSCRMLQNTWVDTMYIANDTIHVANNTIQVEEVQYGNFDVNISFYTSSSFLYPVTSRPYYVDLNQDLYVQAEILHSDAVLTLFVDTCVASPYSNDFTSLTYDLIRSGCVRDDTYGPYSSPSLRIARFRFRAFHFLNRFPSVYLRCKMVVCRAYDPSSRCYRGCVLRSKRDVGSYQEKVDVVLGPIQLQTPPRREEEPR

SEQ ID NO: 31 - DNA, 4966 bp, Homo sapiens
gtagatgcagtccgccgccgccgctgcctcagccagcaatgcaagattagatctctaaatgcagcaaaacactgcctgaaaacagaccggcccgcgcagcaagcagacatttcacggtgcgctggggaagcttcaaaatatatctgtgactctgtcttcgttgctcttcatccccatcaatttcatcacgggaggcgagcagcaagtaagaatttcactttcggatctgcctagagacacacctccctgctccctcccccactcgatgtgaagagtattccggagtctccgggcgggagtagatttgcagcaccctagcgggagcgaggaaaacctactgattctttagctcattatcatctctcccagacgagatttccttcttatcgcctgcctcatcgctcaagtttgagcctcccgaagtccgggcgggagagacgaaacccctggctcacccccagccgcaggaagccaccgccttgctccaagcccctgcagctctgctgcaccgcagcttctcacccagtgcggatgctgtagatcaacaggttcagggaacttgagcagaataaggagagaccaccgggtgccgcagctcgggtgcagagggaaaaaaggacccatagacttgtggctcgcgtcgcgcgcgcacgctgcgccagggccccaggctggcgcgcactccctctctggctcctccagtccgattgctcctgcccccaccttacaggtctgggatgtacctttccatctgttgctgctttcttctatgggcccctgccctcactctcaagaacctcaactactccgtgccggaggagcaaggggccggcacggtgatcgggaacatcggcagggatgctcgactgcagcctgggcttccgcctgcagagcgcggcggcggagggcgcagcaagtcgggtagctaccgggtgctggagaactccgcaccgcacctgctggacgtggacgcagacagcgggctcctctacaccaagcagcgcatcgaccgcgagtccctgtgccgccacaatgccaagtgccagctgtccctcgaggtgttcgccaacgacaaggagatctgcatgatcaaggtagagatccaggacatcaacgacaacgcgccctccttctcctcggaccagatcgaaatggacatctcggagaacgctgctccgggcacccgcttccccctcaccagcgcacatgaccccgacgccggcgagaatgggctccgcacctacctgctcacgcgcgacgatcacggcctctttggactggacgttaagtcccgcggcgacggcaccaagttcccagaactggtcatccagaaggctctggaccgcgagcaacagaatcaccatacgctcgtgctgactgccctggacggtggcgagcctccacgttccgccaccgtacagatcaacgtgaaggtgattgactccaacgacaacagcccggtcttcgaggcgccatcctacttggtggaactgcccgagaacgctccgctgggtacagtggtcatcgatctgaacgccaccgacgccgatgaaggtcccaatggtgaagtgctctactctttcagcagctacgtgcctgaccgcgtgcgggagctcttctccatcgaccccaagaccggcctaatccgtgtgaagggcaatctggactatgaggaaaacgggatgctggagattgacgtgcaggcccgagacctggggcctaaccctatcccagcccactgcaaagtcacggtcaagctcatcgaccgcaacgacaatgcgccgtccatcggtttcgtctccgtgcgccagggggcgctgagcgaggccgcccctcccggcaccgtcatcgccctggtgcgggtcactgaccgggactctggcaagaacggacagctgcagtgtcgggtcctaggcggaggagggacgggcggcggcgggggcctgggcgggcccgggggttccgtccccttcaagcttgaggagaactacgacaacttctacacggtggtgactgaccgcccgctggaccgcgagacacaagacgagtacaacgtgaccatcgtggcgcgggacgggggctctcctcccctcaactccaccaagtcgttcgcgatcaagattctagacgagaacgacaacccgcctcggttcaccaaagggctctacgtgcttcaggtgcacgagaacaacatcccgggagagtacctgggctctgtgctcgcccaggatcccgacctgggccagaacggcaccgtatcctactctatcctgccctcgcacatcggcgacgtgtctatctacacctatgtgtctgtgaatcccacgaacggggccatctacgccctgcgctcctttaacttcgagcagaccaaggcttttgagttcaaggtgcttgctaaggactcgggggcgcccgcgcacttggagagcaacgccacggtgagggtgacagtgctagacgtgaatgacaacgcgccagtgatcgtgctccccacgctgcagaacgacaccgcggagctgcaggtgccgcgcaacgctggcctgggctatctggtgagcactgtgcgcgccctagacagcgacttcggcgagagcgggcgtctcacctacgagatcgtggacggcaacgacgaccacctgtttgagatcgacccgtccagcggcgagatccgcacgctgcaccctttctgggaggacgtgacgcccgtggtggagctggtggtgaaggtgaccgaccacggcaagcctaccctgtccgcagtggccaagctcatcatccgctcggtgagcggatcccttcccgagggggtaccacgggtgaatggcgagcagcaccactgggacatgtcgctgccgctcatcgtgactctgagcactatctccatcatcctcctagcggccatgatcaccatcgccgtcaagtgcaagcgcgagaacaaggagatccgcacttacaactgccgcatcgccgagtacagccacccgcagctgggtgggggcaagggcaagaagaagaagatcaacaaaaatgatatcatgctggtgcagagcgaagtggaggagaggaacgccatgaacgtcatgaacgtggtgagcagcccctccctggccacctcccccatgtacttcgactaccagacccgcctgcccctcagctcgccccggtcggaggtgatgtatctcaaaccggcctccaacaacctgactgtccctcaggggcacgcgggctgccacaccagcttcaccggacaagggactaatgcaagcgagacccctgccactcggatgtccataattcagacagacaattttcccgcagagcccaattacatgggcagcaggcagcagtttgttcaaagtatttcagtagctccacgtttaaggacccagaaagagccagcctgagagacagtgggcacggggacagtgatcaggctgacagtgaccaagacactaacaaaggctcctgctgtgacatgtctgttagggaggcactcaagatgaaaactacttcaactaaaagccaaccacttgaacaagaaccagaagagtgtgttaattgcacagatgaatgccgagtgcttggtcattctgacaggtgctggatgccacagttccctgcagccaatcaggctgaaaatgcagattaccgcacaaatctctttgtacctacagttgaagctaatgttgagactgagacttacgaaactgtgaatcccactgggaaaaagactttttgtacatttggaaaagacaagcgagagcacactattctcattgccaacgttaaaccttatttaaaagccaaacgtgccctgagccctctcctccaagaggtcccctcagcatcaagcagcccaaccaaggcgtgcatcgagccttgcacctcaacaaaaggctccctggatggctgtgaagcaaaaccaggagccctggctgaagcaagcagtcagtacttgcccactgacagtcaatatctgtcacctagtaagcaaccaagagaccctcccttcatggcttccgatcagatggcaagggtctttgcagatgtgcattccagagccagccgggattccagtgagatgggtgctgttcttgagcagcttgaccaccccaacagggatctgggcagagagtctgtggatgcagaggaagttgtgagagaaattgataagcttttgcaagactgccggggaaacgaccctgtggctgtgagaaagtgaaaaaagaaaaaaaaaaaggcattggcattttcttgtctcttctgttgatttaaaaatgatccctcctggtgataacccattttacagggatgaagaaagaccaatgctgctttaaggcttttagtgaacatctgaagtgcccacaagtatgttctttccactgctgatttctttttcagagataacaatggtttcgttttgaccaaacttgtattaggacagaattaatgatgcttaaagagaaaagaaaaaaagagagaagaaaaaggagagatgaaaaaggaggatgaggagaagaattaccttttgacaatctgttaggaaggtatgcagtgtgagaactgaagtatttctgatcactctcagactgtcctccgtgatttatgctgacttaactgtttacctataaaccccatacaaagcagggtcataatttgtgatctgtggtggatttctagcagtcatcacaggcttctactgaaagtcctgaaaagaccttgcagtagtccaagctacaccaaacattaacacatatttgtggtaaacatttctgtataaagttacctgacacacatataaacacaaggaacattccatatcattagtcgaaaacaaaaacaaaaaaaaaacctttggtcatttgtaagacatctcatgtcatataaaagttaaatgtaaaaagatacagtccattttgtcctgcacacacgtagactaattcacgtcaaaaaaaaaaaaaaa

SEQ ID NO: 32 - protein, 889 aa, Homo sapiens
MYLSICCCFLLWAPALTLKNLNYSVPEEQGAGTVIGNIGRDARLQPGLPPAERGGGGRSKSGSYRVLENSAPHLLDVDADSGLLYTKQRIDRESLCRHNAKCQLSLEVFANDKEICMIKVEIQDINDNAPSFSSDQIEMDISENAAPGTRFPLTSAHDPDAGENGLRTYLLTRDDHGLFGLDVKSRGDGTKFPELVIQKALDREQQNHHTLVLTALDGGEPPRSATVQINVKVIDSNDNSPVFEAPSYLVELPENAPLGTVVIDLNATDADEGPNGEVLYSFSSYVPDRVRELFSIDPKTGLIRVKGNLDYEENGMLEIDVQARDLGPNPIPAHCKVTVKLIDRNDNAPSIGFVSVRQGALSEAAPPGTVIALVRVTDRDSGKNGQLQCRVLGGGGTGGGGGLGGPGGSVPFKLEENYDNFYTVVTDRPLDRETQDEYNVTIVARDGGSPPLNSTKSFAIKILDENDNPPRFTKGLYVLQVHENNIPGEYLGSVLAQDPDLGQNGTVSYSILPSHIGDVSIYTYVSVNPTNGAIYALRSFNFEQTKAFEFKVLAKDSGAPAHLESNATVRVTVLDVNDNAPVIVLPTLQNDTAELQVPRNAGLGYLVSTVRALDSDFGESGRLTYEIVDGNDDHLFEIDPSSGEIRTLHPFWEDVTPVVELVVKVTDHGKPTLSAVAKLIIRSVSGSLPEGVPRVNGEQHHWDMSLPLIVTLSTISIILLAAMITIAVKCKRENKEIRTYNCRIAEYSHPQLGGGKGKKKKINKNDIMLVQSEVEERNAMNVMNVVSSPSLATSPMYFDYQTRLPLSSPRSEVMYLKPASNNLTVPQGHAGCHTSFTGQGTNASETPATRMSIIQTDNFPAEPNYMGSRQQFVQSISVAPRLRTQKEPA

SEQ ID NO: 33 - DNA, 733 bp, Homo sapiens
aaacagcaggaaatagaaacttaagagaaatacacacttctgagaaactgaaacgacaggggaaaggaggtctcactgagcaccgtcccagcatccggacaccacagcggcccttcgctccacgcagaaaaccacacttctcaaaccttcactcaacacttccttccccaaagccagaagatgcacaaggaggaacatgaggtggctgtgctgggggcaccccccagcaccatccttccaaggtccaccgtgatcaacatccacagcgagacctccgtgcccgaccatgtcgtctggtccctgttcaacaccctcttcttgaactggtgctgtctgggcttcatagcattcgcctactccgtgaagtctagggacaggaagatggttggcgacgtgaccggggcccaggcctatgcctccaccgccaagtgcctgaacatctgggccctgattctgggcatcctcatgaccattggattcatcctgttactggtattcggctctgtgacagtctaccatattatgttacagataatacaggaaaaacggggttactagtagccgcccatagcctgcaacctttgcactccactgtgcaatgctggccctgcacgctggggctgttgcccctgcccccttggtcctgcccctagatacagcagtttatacccacacacctgtctacagtgtcattcaataaagtgcacgtgcttgtgaaaaaaaaaaaaaaaaa

SEQ ID NO: 34 - protein, 125 aa, Homo sapiens
MHKEEHEVAVLGAPPSTILPRSTVINIHSETSVPDHVVWSLFNTLFLNWCCLGFIAFAYSVKSRDRKMVGDVTGAQAYASTAKCLNIWALILGILMTIGFILLLVFGSVTVYHIMLQIIQEKRGY

SEQ ID NO: 35 - DNA, 894 bp, Homo sapiens
gcccgtcttcgtgtctcctccctccctcgccttcctccttcctagctcctctcctccagggccagactgagcccaggttgatttcaggcggacaccaatagactccacagcagctccaggagcccagacaccggcggccagaagcaaggctaggagctgctgcagccatgtcggccctcagcctcctcattctgggcctgctcacggcagtgccacctgccagctgtcagcaaggcctggggaaccttcagccctggatgcagggccttatcgcggtggccgtgttcctggtcctcgttgcaatcgcctttgcagtcaaccacttctggtgccaggaggagccggagcctgcacacatgatcctgaccgtcggaaacaaggcagatggagtcctggtgggaacagatggaaggtactcttcgatggcggccagtttcaggtccagtgagcatgagaatgcctatgagaatgtgcccgaggaggaaggcaaggtccgcagcaccccgatgtaaccttctctgtggctccaaccccaagactcccaggcacatgggatggatgtccagtgctaccacccaagccccctccttctttgtgtggaatctgcaatagtgggctgactccctccagccccatgccggccctacccgcccttgaagtatagccagccaaggttggagctcagaccgtgtctaggttggggctcggctgtggccctggggtctcctgctcagctcagaagagccttctggagaggacagtcagctgagcacctcccatcctgctcacacgtccttccccataactatggaaatggccctaatttctgtgaaataaagactttttgtatttctggggctgaggctcagcaacagcccctcaggcttccagtga

SEQ ID NO: 36 - protein, 114 aa, Homo sapiens
MSALSLLILGLLTAVPPASCQQGLGNLQPWMQGLIAVAVFLVLVAIAFAVNHFWCQEEPEPAHMILTVGNKADGVLVGTDGRYSSMAASFRSSEHENAYENVPEEEGKVRSTPM

SEQ ID NO: 37 - DNA, 5395 bp, Homo sapiens
aattcactaatgcattctgctctttttgagagcacagcttctcagatgtgctccttggagctggtgtgcagtgtcctgactgtaagatcaagtccaaacctgttttggaattgaggaaacttctcttttgatctcagcccttggtggtccaggtcttcatgctgctgtgggtgatattactggtcctggctcctgtcagtggacagtttgcaaggacacccaggcccattattttcctccagcctccatggaccacagtcttccaaggagagagagtgaccctcacttgcaagggatttcgcttctactcaccacagaaaacaaaatggtaccatcggtaccttgggaaagaaatactaagagaaaccccagacaatatccttgaggttcaggaatctggagagtacagatgccaggcccagggctcccctctcagtagccctgtgcacttggatttttcttcagcttcgctgatcctgcaagctccactttctgtgtttgaaggagactctgtggttctgaggtgccgggcaaaggcggaagtaacactgaataatactatttacaagaatgataatgtcctggcattccttaataaaagaactgacttccatattcctcatgcatgtctcaaggacaatggtgcatatcgctgtactggatataaggaaagttgttgccctgtttcttccaatacagtcaaaatccaagtccaagagccatttacacgtccagtgctgagagccagctccttccagcccatcagcgggaacccagtgaccctgacctgtgagacccagctctctctagagaggtcagatgtcccgctccggttccgcttcttcagagatgaccagaccctgggattaggctggagtctctccccgaatttccagattactgccatgtggagtaaagattcagggttctactggtgtaaggcagcaacaatgccttacagcgtcatatctgacagcccgagatcctggatacaggtgcagatccctgcatctcatcctgtcctcactctcagccctgaaaaggctctgaattttgagggaaccaaggtgacacttcactgtgaaacccaggaagattctctgcgcactttgtacaggttttatcatgagggtgtccccctgaggcacaagtcagtccgctgtgaaaggggagcatccatcagcttctcactgactacagagaattcagggaactactactgcacagctgacaatggccttggcgccaagcccagtaaggctgtgagcctctcagtcactgttcccgtgtctcatcctgtcctcaacctcagctctcctgaggacctgatttttgagggagccaaggtgacacttcactgtgaagcccagagaggttcactccccatcctgtaccagtttcatcatgagggtgctgccctggagcgtaggtcggccaactctgcaggaggagtggccatcagcttctctctgactgcagagcattcagggaactactactgcacagctgacaatggctttggcccccagcgcagtaaggcggtgagcctctccgtcactgtccctgtgtctcatcctgtcctcaccctcagctctgctgaggccctgacttttgaaggagccactgtgacacttcactgtgaagtccagagaggttccccacaaatcctataccagttttatcatgaggacatgcccctgtggagcagctcaacaccctctgtgggaagagtgtccttcagcttctctctgactgaaggacattcagggaattactactgcacagctgacaatggctttggtccccagcgcagtgaagtggtgagcctttttgtcactgttccagtgtctcgccccatcctcaccctcagggttcccagggcccaggctgtggtgggggacctgctggagcttcactgtgaggccccgagaggctctcccccaatcctgtactggttttatcatgaggatgtcaccctggggagcagctcagccccctctggaggagaagcttctttcaacctctctctgactgcagaacattctggaaactactcatgtgaggccaacaatggcctagtggcccagcacagtgacacaatatcactcagtgttatagttccagtatctcgtcccatcctcaccttcagggctcccagggcccaggctgtggtgggggacctgctggagcttcactgtgaggccctgagaggctcctccccaatcctgtactggttttatcatgaagatgtcaccctgggtaagatctcagccccctctggaggaggggcctccttcaacctctctctgactacagaacattctggaatctactcctgtgaggcagacaatggtctggaggcccagcgcagtgagatggtgacactgaaagttgcagttccggtgtctcgcccggtcctcaccctcagggctcccgggacccatgctgcggtgggggacctgctggagcttcactgtgaggccctgagaggctctcccctgatcctgtaccggttttttcatgaggatgtcaccctaggaaataggtcgtccccctctggaggagcgtccttaaacctctctctgactgcagagcactctggaaactactcctgtgaggccgacaatggcctcggggcccagcgcagtgagacagtgacactttatatcacagggctgaccgcgaacagaagtggcccttttgccacaggagtcgccgggggcctgctcagcatagcaggccttgctgcgggggcactgctgctctactgctggctctcgagaaaagcagggagaaagcctgcctctgaccccgccaggagcccttcagactcggactcccaagagcccacctatcacaatgtaccagcctgggaagagctgcaaccagtgtacactaatgcaaatcctagaggagaaaatgtggtttactcagaagtacggatcatccaagagaaaaagaaacatgcagtggcctctgaccccaggcatctcaggaacaagggttcccctatcatctactctgaagttaaggtggcgtcaaccccggtttccggatccctgttcttggcttcctcagctcctcacagatgagtccacacgtctctccaactgctgtttcagcctctgcaccccaaagttccccttgggggagaagcagcattgaagtgggaagatttaggctgccccagaccatatctactggcctttgtttcacatgtcctcattctcagtctgaccagaatgcagggccctgctggactgtcacctgtttcccagttaaagccctgactggcaggttttttaatccagtggcaaggtgctcccactccagggcccagcacatctcctggattccttagtgggcttcagctgtggttgctgttctgagtactgctctcatcacacccccacagagggggtcttaccacacaaagggagagtgggccttcaggagatgccgggctggcctaacagctcaggtgctcctaaactccgacacagagttcctgctttgggtggatgcatttctcaattgtcatcagcctggtggggctactgcagtgtgctgccaaatgggacagcacacagcctgtgcacatgggacatgtgatgggtctccccacgggggctgcatttcacactcctccacctgtctcaaactctaaggtcggcacttgacaccaaggtaacttctctcctgctcatgtgtcagtgtctacctgcccaagtaagtggctttcatacaccaagtcccaagttcttcccatcctaacagaagtaacccagcaagtcaaggccaggaggaccaggggtgcagacagaacacatactggaacacaggaggtgctcaattactatttgactgactgactgaatgaatgaatgaatgaggaagaaaactgtgggtaatcaaactggcataaaatccagtgcactccctaggaaatccgggaggtattctggcttccctaagaaacaatggaagagaaggagcttggatgaggaaactgttcagcaagaggaagggcttctcacactttcatgtgcttgtggatcacctgaggatcctgtgaaaatacagatactgattcagtgggtctgcgtagagcctgagactgccattctaacatgttcccaggggatgctgatgctgctggccctgggactgcactgcatgcatgtgaagccctataggtctcagcagaggcccatggagagggaatgtgtggctctggctgcccagggcccaactcggttcacacggatcgtgctgctccctggccagcctttggccacagcaccaccagctgctgttgctgagagagcttcttctctgtgacatgttggctttcatcagccaccctgggaagcggaaagtagctgccactatctttgtttccccacctcaggcctcacactttcccatgaaaagggtgaatgtatataacctgagccctctccattcagagttgttctcccatctctgagcaatgggatgttctgttccgcttttatgatatccatcacatcttatcttgatctttgctcccagtggattgtacagtgatgacttttaagccccacggccctgaaataaaatccttccaagggcattggaagctcactccacctgaaccatggcttttcatgcttccaagtgtcagggccttgcccagatagacagggctggctctgctgccccaacctttcaaggaggaaaccagacacctgagacaggagcctgtatgcagcccagtgcagccttgcagaggacaaggctggaggcatttgtcatcactacagatatgcaactaaaatagacgtggagcaagagaaatgcattcccaccgaggccgcttttttaggcctagttgaaagtcaagaaggacagcagcaagcataggctcaggattaaagaaaaaaatctgctcacagtctgttctggaggtcacatcaccaacaaagctcacgccctatgcagttctgagaaggtggaggcaccaggctcaaaagaggaaatttagaatttctcattgggagagtaaggtacccccatcccagaatgataactgcacagtggcagaacaaactccaccctaatgtgggtggaccccgtccagtctgttgaaggcctgaatgtaacaaaagggcttattcttcctcaagtaagggggaactcctgctttgggctgggacataagtttttctgctttcagacgcaaactgaaaaatggctcttcttgggtcttgagcttgctggcatatggactgaaagaaactatgctattggatctcctggatctccagcttgctgactgcagatcttgagatatgtcagcctctacagtcacaagagctaattcattctaataaaccaatctttctgtaaaaaa

SEQ ID NO: 38 - protein, 977 aa, Homo sapiens
MLLWVILLVLAPVSGQFARTPRPIIFLQPPWTTVFQGERVTLTCKGFRFYSPQKTKWYHRYLGKEILRETPDNILEVQESGEYRCQAQGSPLSSPVHLDFSSASLILQAPLSVFEGDSVVLRCRAKAEVTLNNTIYKNDNVLAFLNKRTDFHIPHACLKDNGAYRCTGYKESCCPVSSNTVKIQVQEPFTRPVLRASSFQPISGNPVTLTCETQLSLERSDVPLRFRFFRDDQTLGLGWSLSPNFQITAMWSKDSGFYWCKAATMPYSVISDSPRSWIQVQIPASHPVLTLSPEKALNFEGTKVTLHCETQEDSLRTLYRFYHEGVPLRHKSVRCERGASISFSLTTENSGNYYCTADNGLGAKPSKAVSLSVTVPVSHPVLNLSSPEDLIFEGAKVTLHCEAQRGSLPILYQFHHEGAALERRSANSAGGVAISFSLTAEHSGNYYCTADNGFGPQRSKAVSLSVTVPVSHPVLTLSSAEALTFEGATVTLHCEVQRGSPQILYQFYHEDMPLWSSSTPSVGRVSFSFSLTEGHSGNYYCTADNGFGPQRSEVVSLFVTVPVSRPILTLRVPRAQAVVGDLLELHCEAPRGSPPILYWFYHEDVTLGSSSAPSGGEASFNLSLTAEHSGNYSCEANNGLVAQHSDTISLSVIVPVSRPILTFRAPRAQAVVGDLLELHCEALRGSSPILYWFYHEDVTLGKISAPSGGGASFNLSLTTEHSGIYSCEADNGLEAQRSEMVTLKVAVPVSRPVLTLRAPGTHAAVGDLLELHCEALRGSPLILYRFFHEDVTLGNRSSPSGGASLNLSLTAEHSGNYSCEADNGLGAQRSETVTLYITGLTANRSGPFATGVAGGLLSIAGLAAGALLLYCWLSRKAGRKPASDPARSPSDSDSQEPTYHNVPAWEELQPVYTNANPRGENVVYSEVRIIQEKKKHAVASDPRHLRNKGSPIIYSEVKVASTPVSGSLFLASSAPHR

SEQ ID NO: 39 - DNA, 3457 bp, Homo sapiens
gggacgcccgggcggccctgaaggggacggggcggccccagtcggaggtcgcagggagctccgcccccgactcggtataagagctgggcccggcccacggcggcggcggcggcggcggagagagctggctcagggcgtccgctaggctcggacgacctgctgagcctcccaaaccgcttccataaggctttgcctttccaacttcagctacagtgttagctaagtttggaaagaaggaaaaaagaaaatccctgggccccttttcttttgttctttgccaaagtcgtcgttgtagtctttttgcccaaggctgttgtgtttttagaggtcctatctccagttccttgcactcctgttaacaagcacctcagcgagagcagcagcagcgatagcagccgcagaagagccagcggggtcgcgtagtgtcatgaccagggcgggagatcacaaccgccagagaggatgctgtggatccttggccgactacctgacctctgcaaaattccttctctaccttggtcattctctctctacttggggagatcggatgtggcactttgcggtgtctgtgtttctggtagagctctatggaaacagcctccttttgacagcagtctacgggctggtggtggcagggtctgttctggtcctgggagccatcatcggtgactgggtggacaagaatgctagacttaaagtggcccagacctcgctggtggtacagaatgtttcagtcatcctgtgtggaatcatcctgatgatggttttcttacataaacatgagcttctgaccatgtaccatggatgggttctcacttcctgctatatcctgatcatcactattgcaaatattgcaaatttggccagtactgctactgcaatcacaatccaaagggattggattgttgttgttgcaggagaagacagaagcaaactagcaaatatgaatgccacaatacgaaggattgaccagttaaccaacatcttagcccccatggctgttggccagattatgacatttggctccccagtcatcggctgtggctttatttcgggatggaacttggtatccatgtgcgtggagtacgttctgctctggaaggtttaccagaaaaccccagctctagctgtgaaagctggtcttaaagaagaggaaactgaattgaaacagctgaatttacacaaagatactgagccaaaacccctggagggaactcatctaatgggtgtgaaagactctaacatccatgagcttgaacatgagcaagagcctacttgtgcctcccagatggctgagcccttccgtaccttccgagatggatgggtctcctactacaaccagcctgtgtttctggctggcatgggtcttgctttcctttatatgactgtcctgggctttgactgcatcaccacagggtacgcctacactcagggactgagtggttccatcctcagtattttgatgggagcatcagctataactggaataatgggaactgtagcttttacttggctacgtcgaaaatgtggtttggttcggacaggtctgatctcaggattggcacagctttcctgtttgatcttgtgtgtgatctctgtattcatgcctggaagccccctggacttgtccgtttctccttttgaagatatccgatcaaggttcattcaaggagagtcaattacacctaccaagatacctgaaattacaactgaaatatacatgtctaatgggtctaattctgctaatattgtcccggagacaagtcctgaatctgtgcccataatctctgtcagtctgctgtttgcaggcgtcattgctgctagaatcggtctttggtcctttgatttaactgtgacacagttgctgcaagaaaatgtaattgaatctgaaagaggcattataaatggtgtacagaactccatgaactatcttcttgatcttctgcatttcatcatggtcatcctggctccaaatcctgaagcttttggcttgctcgtattgatttcagtctcctttgtggcaatgggccacattatgtatttccgatttgcccaaaatactctgggaaacaagctctttgcttgcggtcctgatgcaaaagaagttaggaaggaaaatcaagcaaatacatctgttgtttgagacagtttaactgttgctatcctgttactagattatatagagcacatgtgcttattttgtactgcagaattccaataaatggctgggtgttttgctctgtttttaccacagctgtgccttgagaactaaaagctgtttaggaaacctaagtcagcagaaattaactgattaatttcccttatgttgaggcatggaaaaaaaattggaaaagaaaaactcagtttaaatacggagactataatgataacactgaattcccctatttctcatgagtagatacaatcttacgtaaaagagtggttagtcacgtgaattcagttatcatttgacagattcttatctgtactagaattcagatatgtcagttttctgcaaaactcactcttgttcaagactagctaatttatttttttgcatcttagttatttttaaaaacaaattcttcaagtatgaagactaaattttgataactaatattatccttattgatcctattgatcttaaggtatttacatgtatgtggaaaaacaaaacacttaactagaattctctaataaggtttatggtttagcttaaagagcacctttgtatttttattatcagatggggcaacatattgtatgaagcatatgtagcacttcacagcatggttatcatgtaagctgcaggtagaagcacacactcaggtagaatatttttatttttactgttttatacccagaagttatttctacattaagctgtaaagtagatttatcacacaatgactgcatacagacttcaaatatgtcaatagtttggtcatagaacctagaagccaaaagccacacagaagggcaagaatcccaatttaactcatgttatcatcattagtgatctgtgttgtagaacatgagggtgtaagccttcagcctggcaagttacatgtagaaagcccacacttgtgaaggttttgttttacaaatcacttgatttaagttctacagcaagaatattcataaaagtatccctttcaaatgcctttgagaagaatagaagaaaaaaagtttgtatatattttaaaaaattgttttaaaagtcagtttgcaacatgtctgtaccaagatggtactttgccttaaccgtttatatgcactttcatggagactgcaatacgttgctatgagcactttctttatccttggagtttaatcctttgcttcatctttctacagtatgacataatgatttgctatgttgtaaaatctttgtaaaaaatttctatataaaaatattttgaaaatcttaaaaaaaaaaaaaaaaaaaaaaaaaaaa

SEQ ID NO: 40 - protein, 571 aa, Homo sapiens
MTRAGDHNRQRGCCGSLADYLTSAKFLLYLGHSLSTWGDRMWHFAVSVFLVELYGNSLLLTAVYGLVVAGSVLVLGAIIGDWVDKNARLKVAQTSLVVQNVSVILCGIILMMVFLHKHELLTMYHGWVLTSCYILIITIANIANLASTATAITIQRDWIVVVAGEDRSKLANMNATIRRIDQLTNILAPMAVGQIMTFGSPVIGCGFISGWNLVSMCVEYVLLWKVYQKTPALAVKAGLKEEETELKQLNLHKDTEPKPLEGTHLMGVKDSNIHELEHEQEPTCASQMAEPFRTFRDGWVSYYNQPVFLAGMGLAFLYMTVLGFDCITTGYAYTQGLSGSILSILMGASAITGIMGTVAFTWLRRKCGLVRTGLISGLAQLSCLILCVISVFMPGSPLDLSVSPFEDIRSRFIQGESITPTKIPEITTEIYMSNGSNSANIVPETSPESVPIISVSLLFAGVIAARIGLWSFDLTVTQLLQENVIESERGIINGVQNSMNYLLDLLHFIMVILAPNPEAFGLLVLISVSFVAMGHIMYFRFAQNTLGNKLFACGPDAKEVRKENQANTSVV

SEQ ID NO: 41 - DNA, 2213 bp, Homo sapiens
gctctagaactagtggatcccccgggctgcaggaattctctaaagaagcccctgggagcacagctcatcaccatggactggacctggaggttcctctttgtggtggcagcagctacaggtgtccagtcccaggtgcagctggtgcagtctggggctgaggtgaagaagcctgggtcctcggtgaaggtctcctgcaaggcttctggaggcaccttcagcagctatgctatcagctgggtgcgacaggcccctggacaagggcttgagtggatgggagggatcatccctatctttggtacagcaaactacgcacagaagttccagggcagagtcacgattaccgcggacgaatccacgagcacagcctacatggagctgagcagcctgagatctgaggacacggccgtgtattactgtgcgaaaaccgggatcctggggccgtatagcagtggctggtacccgaactcggactactactactacggtatggacgtctggggccaagggaccacggtcaccgtctcctcagggagtgcatccgccccaacccttttccccctcgtctcctgtgagaattccccgtcggatacgagcagcgtggccgttggctgcctcgcacaggacttccttcccgactccatcactttctcctggaaatacaagaacaactctgacatcagcagcacccggggcttcccatcagtcctgagagggggcaagtacgcagccacctcacaggtgctgctgccttccaaggacgtcatgcagggcacagacgaacacgtggtgtgcaaagtccagcaccccaacggcaacaaagaaaagaacgtgcctcttccagtgattgctgagctgcctcccaaagtgagcgtcttcgtcccaccccgcgacggcttcttcggcaacccccgcagcaagtccaagctcatctgccaggccacgggtttcagtccccggcagattcaggtgtcctggctgcgcgaggggaagcaggtggggtctggcgtcaccacggaccaggtgcaggctgaggccaaagagtctgggcccacgacctacaaggtgaccagcacactgaccatcaaagagagcgactggctcagccagagcatgttcacctgccgcgtggatcacaggggcctgaccttccagcagaatgcgtcctccatgtgtgtccccgatcaagacacagccatccgggtcttcgccatccccccatcctttgccagcatcttcctcaccaagtccaccaagttgacctgcctggtcacagacctgaccacctatgacagcgtgaccatctcctggacccgccagaatggcgaagctgtgaaaacccacaccaacatctccgagagccaccccaatgccactttcagcgccgtgggtgaggccagcatctgcgaggatgactggaattccggggagaggttcacgtgcaccgtgacccacacagacctgccctcgccactgaagcagaccatctcccggcccaagggggtggccctgcacaggcccgatgtctacttgctgccaccagcccgggagcagctgaacctgcgggagtcggccaccatcacgtgcctggtgacgggcttctctcccgcggacgtcttcgtgcagtggatgcagagggggcagcccttgtccccggagaagtatgtgaccagcgccccaatgcctgagccccaggccccaggccggtacttcgcccacagcatcctgaccgtgtccgaagaggaatggaacacgggggagacctacacctgcgtggtggcccatgaggccctgcccaacagggtcaccgagaggaccgtggacaagtccaccgagggggaggtgagcgccgacgaggagggctttgagaacctgtgggccaccgcctccaccttcatcgtcctcttcctcctgagcctcttctacagtaccaccgtcaccttgttcaaggtgaaatgatcccaacagaagaacatcggagaccagagagaggaactcaaaggggcgctgcctccgggtctggggtcctggcctgcgtggcctgttggcacgtgtttctcttcccgcccggcctccagttgtgtgctctcacacaggcttccttctcgaccggcaggggctggctggcttgcaggccacgaggtgggctctaccccacactgctttgctgtgtatacgcttgttgccctgaaataaatatgcacattttatccatg

SEQ ID NO: 42 - protein, 627 aa, Homo sapiens [sequence omitted]

SEQ ID NO: 43 - DNA, 947 bp, Homo sapiens
ccatccctgagatctttttataaaaaacccagtctttgctgaccagacaaagcataccagatctcaccagagagtcctaggggactacagaaggaaaaagacaagaggcagtaggatatctgtgtgtcctcccgctgaccacacttcctttagtgacccgattgcctcctcaagtcgcagacactatgctgcctcccatggccctgcccagtgtgtcctggatgctgctttcctgcctcattctcctgtgtcaggttcaaggtgaagaaacccagaaggaactgccctctccacggatcagctgtcccaaaggctccaaggcctatggctccccctgctatgccttgtttttgtcaccaaaatcctggatggatgcagatctggcttgccagaagcggccctctggaaaactggtgtctgtgctcagtggggctgagggatccttcgtgtcctccctggtgaggagcattagtaacagctattcatacatctggattgggctccatgaccccacacagggctctgagcctgatggagatggatgggagtggagtagcactgatgtgatgaattactttgcatgggagaaaaatccctccaccatcttaaaccctggccactgtgggagcctgtcaagaagcacaggatttctgaagtggaaagattataactgtgatgcaaagttaccctatgtctgcaagttcaaggactagggcaggtgggaagtcagcagcctgagcttggcgtgcagctcatcatggacatgagaccagtgtgaagactcaccctggaagagaatattctccccaaactgccctacctgactaccttgtcatgatcctccttctttttcctttttcttcaccttcatttcaggcttttctctgtcttccatgtcttgagatctcagagaataataataaaaatgttactttatacgtaaaaaa

SEQ ID NO: 44 - protein, 175 aa, Homo sapiens
MLPPMALPSVSWMLLSCLILLCQVQGEETQKELPSPRISCPKGSKAYGSPCYALFLSPKSWMDADLACQKRPSGKLVSVLSGAEGSFVSSLVRSISNSYSYIWIGLHDPTQGSEPDGDGWEWSSTDVMNYFAWEKNPSTILNPGHCGSLSRSTGFLKWKDYNCDAKLPYVCKFKD

SEQ ID NO: 45 - DNA, 3033 bp, Homo sapiens
aacacaactggcacatctcttttctcatctcttgaaaaaaaccaacagagaaaaaagtaccttgagaataaaggtaatgattaatctgtcaggcacaaaagggattgttttggggatttcgggttctaagtcgcagattcaaacaaatagcagcgaacagggaatgacagttccaccagaagacgattaagccacagcctctaattggaacggcatttgtacagtcagagactcttaccagacatctccaggaatctgtgagccattgtcaaaacgtccattttcatctggctgtgaaagtgaggaccacaacaggtaggtattggtagaaacaggagtcctcagagaagccccaagatgcagcctgagggagcagaaaagggaaaaagcttcaagcagagactggtcttgaagagcagcttagcgaaagaaaccctctctgagttcttgggcacgttcatcttgattgtccttggatgtggctgtgttgcccaagctattctcagtcgaggacgttttggaggggtcatcactatcaatgttggattttcaatggcagttgcaatggccatttatgtggctggcggtgtctctggtggtcacatcaacccagctgtgtctttagcaatgtgtctctttggacggatgaaatggttcaaattgccattttatgtgggagcccagttcttgggagcctttgtgggggctgcaaccgtctttggcatttactatgatggacttatgtcctttgctggtggaaaactgctgatcgtgggagaaaatgcaacagcacacatttttgcaacatacccagctccgtatctatctctggcgaacgcatttgcagatcaagtggtggccaccatgatactcctcataatcgtctttgccatctttgactccagaaacttgggagcccccagaggcctagagcccattgccatcggcctcctgattattgtcattgcttcctccctgggactgaacagtggctgtgccatgaacccagctcgagacctgagtcccagacttttcactgccttggcaggctgggggtttgaagtcttcagagctggaaacaacttctggtggattcctgtagtgggccctttggttggtgctgtcattggaggcctcatctatgttcttgtcattgaaatccaccatccagagcctgactcagtctttaagacagaacaatctgaggacaaaccagagaaatatgaactcagtgtcatcatgtagtggcatgctcagctctggatttgcagtcagtttgggattctcttcagaaagatggcatctaagtgtctgtgttcttgtaagcctgaggtggaatccacccagttttgtctgctagccatatgggacatctaattggaaaagcatctgcataaaagtttggaaacaatgaccacttctctaccattgtcccccacccccaccccccagaataacgctgactgtcccctgaaacagccttctctcctgccctgtttatttcatcctcgatgggaattcttgctaggtaagcactaataactcggcatcttgacgatagtcccatttgggtggtttcagctgcactatctgtatgaaatggtgtcaccaaaacccttttcttcagtatcgacaaagattacattctgagtaccaaccaaaccctaaattgaaagacaaaactatggtttcagtcaacatattcatgaattagggagctaatgggttaagcttccagttcccgctatgctactggatttgtataaatactgatattctccaaacctagtggtgtagggagcaagagaatgcagctggaaggcacaaggggaggacattgtggcattcagaaactgcaggagacaagatgaatttgagaagccaaatggaatttttaatggaaaccatttatcagattaatctcttgctctcctgcattttagaggacaccaattaatttcctggtctttagtatataataacctaaaataccattgtaacctcagtcatgaaaaatacatcactctgtctttttagctcaaatgtattttcctaattgcccacttgagaacagacatttgacaagttatatcaacgactgtgcttgtccattattttacacatgccctagaagccaaaactgaaagccactggatcctggtctagctgaatcttcagagtgggaggtctccaaaaagatattaccttattgggcttaacaattcacaaggcactttcacacccattatctaatttaatcctcataatgactatgtgaggcaaatgccacattgcccatttttcagataaagaaacaaaatcttagggaagataagttgagttgtccaagagcacactgaaagttgaatgttatctaatgcattcctctacctttcagaagatcagtagctggctgagaatctttgccaaatcttccttgctagccagaagtggaattggcagcttctagaatatgtacacctctggacaaaatgttcctcaatcttaagatacaaagaccctcattgtctgggtctattcccacacttactgagtacagatgaaggaaagtggtagcaatttaatcataactttcatttgctgaaaaacattatgagaaggcctcccttcctaagccacctctggtcttgctaagtcttgatcttgcttcctgccagcaccaaacattacattcaggggatttcctctggctcagtcttttccccttgaagttctctaatagatgttacttttgacaaaagatcgcctatgagttacaagcaccaggggatgctctacatcaagggatgcaccttcagtcaaactgtcaaaaagcccagaattcccaaaggcattaggtttcccaactgctttgtgctgatatcagaacagcagaaattaaatgtgaaatgtttctgatgacttatgttctacaatctatggacatacgggatttttttttcttgctttgaagctacctggatatttcctatttgaaataaaattgttcggtcattgttgaaaaaaaaaaaa

SEQ ID NO: 46 - protein, 295 aa, Homo sapiens
MQPEGAEKGKSFKQRLVLKSSLAKETLSEFLGTFILIVLGCGCVAQAILSRGRFGGVITINVGFSMAVAMAIYVAGGVSGGHINPAVSLAMCLFGRMKWFKLPFYVGAQFLGAFVGAATVFGIYYDGLMSFAGGKLLIVGENATAHIFATYPAPYLSLANAFADQVVATMILLIIVFAIFDSRNLGAPRGLEPIAIGLLIIVIASSLGLNSGCAMNPARDLSPRLFTALAGWGFEVFRAGNNFWWIPVVGPLVGAVIGGLIYVLVIEIHHPEPDSVFKTEQSEDKPEKYELSVIM

SEQ ID NO: 47 - DNA, 2844 bp, Homo sapiens
atgaggcccggcctctcatttctcctagcccttctgttcttccttggccaagctgcaggggatttgggggatgtgggacctccaattcccagccccggcttcagctctttcccaggtgttgactccagctccagcttcagctccagctccaggtcgggctccagctccagccgcagcttaggcagcggaggttctgtgtcccagttgttttccaatttcaccggctccgtggatgaccgtgggacctgccagtgctctgtttccctgccagacaccacctttcccgtggacagagtggaacgcttggaattcacagctcatgttctttctcagaagtttgagaaagaactttccaaagtgagggaatatgtccaattaattagtgtgtatgaaaagaaactgttaaacctaactgtccgaattgacatcatggagaaggataccatttcttacactgaactggacttcgagctgatcaaggtagaagtgaaggagatggaaaaactggtcatacagctgaaggagagttttggtggaagctcagaaattgttgaccagctggaggtggagataagaaatatgactctcttggtagagaagcttgagacactagacaaaaacaatgtccttgccattcgccgagaaatcgtggctctgaagaccaagctgaaagagtgtgaggcctctaaagatcaaaacacccctgtcgtccaccctcctcccactccagggagctgtggtcatggtggtgtggtgaacatcagcaaaccgtctgtggttcagctcaactggagagggttttcttatctatatggtgcttggggtagggattactctccccagcatccaaacaaaggactgtattgggtggcgccattgaatacagatgggagactgttggagtattatagactgtacaacacactggatgatttgctattgtatataaatgctcgagagttgcggatcacctatggccaaggtagtggtacagcagtttacaacaacaacatgtacgtcaacatgtacaacaccgggaatattgccagagttaacctgaccaccaacacgattgctgtgactcaaactctccctaatgctgcctataataaccgcttttcatatgctaatgttgcttggcaagatattgactttgctgtggatgagaatggattgtgggttatttattcaactgaagccagcactggtaacatggtgattagtaaactcaatgacaccacacttcaggtgctaaacacttggtataccaagcagtataaaccatctgcttctaacgccttcatggtatgtggggttctgtatgccacccgtactatgaacaccagaacagaagagattttttactattatgacacaaacacagggaaagagggcaaactagacattgtaatgcataagatgcaggaaaaagtgcagagcattaactataacccttttgaccagaaactttatgtctataacgatggttaccttctgaattatgatctttctgtcttgcagaagccccagtaagctgtttaggagttagggtgaaagagaaaatgtttgttgaaaaaatagtcttctccacttacttagatatctgcaggggtgtctaaaagtgtgttcattttgcagcaatgtttaggtgcatagttctaccacactagagatctaggacatttgtcttgatttggtgagttctcttgggaatcatctgcctcttcaggcgcattttgcaataaagtctgtctagggtgggattgtcagaggtctaggggcactgtgggcctagtgaagcctactgtgaggaggcttcactagaagccttaaattaggaattaaggaacttaaaactcagtatggcgtctagggattctttgtacaggaaatattgcccaatgactagtcctcatccatgtagcaccactaattcttccatgcctggaagaaacctggggacttagttaggtagattaatatctggagctcctcgagggaccaaatctccaacttttttttcccctcactagcacctggaatgatgctttgtatgtggcagataagtaaatttggcatgcttatatattctacatctgtaaagtgctgagttttatggagagaggcctttttatgcattaaattgtacatggcaaataaatcccagaaggatctgtagatgaggcacctgctttttcttttctctcattgtccaccttactaaaagtcagtagaatcttctacctcataacttccttccaaaggcagctcagaagattagaaccagacttactaaccaattccaccccccaccaacccccttctactgcctactttaaaaaaattaatagttttctatggaactgatctaagattagaaaaattaattttctttaatttcattatgaacttttatttacatgactctaagactataagaaaatctgatggcagtgacaaagtgctagcatttattgttatctaataaagaccttggagcatatgtgcaacttatgagtgtatcagttgttgcatgtaatttttgcctttgtttaagcctggaacttgtaagaaaatgaaaatttaatttttttttctaggacgagctatagaaaagctattgagagtatctagttaatcagtgcagtagttggaaaccttgctggtgtatgtgatgtgcttctgtgcttttgaatgactttatcatctagtctttgtctatttttcctttgatgttcaagtcctagtctataggattggcagtttaaatgctttactcccccttttaaaataaatgattaaaatgtgctttgaaaaaaaaaaaaaaaaaaaaaaaaaaaaaaa

SEQ ID NO: 48 - protein, 510 aa, Homo sapiens
MRPGLSFLLALLFFLGQAAGDLGDVGPPIPSPGFSSFPGVDSSSSFSSSSRSGSSSSRSLGSGGSVSQLFSNFTGSVDDRGTCQCSVSLPDTTFPVDRVERLEFTAHVLSQKFEKELSKVREYVQLISVYEKKLLNLTVRIDIMEKDTISYTELDFELIKVEVKEMEKLVIQLKESFGGSSEIVDQLEVEIRNMTLLVEKLETLDKNNVLAIRREIVALKTKLKECEASKDQNTPVVHPPPTPGSCGHGGVVNISKPSVVQLNWRGFSYLYGAWGRDYSPQHPNKGLYWVAPLNTDGRLLEYYRLYNTLDDLLLYINARELRITYGQGSGTAVYNNNMYVNMYNTGNIARVNLTTNTIAVTQTLPNAAYNNRFSYANVAWQDIDFAVDENGLWVIYSTEASTGNMVISKLNDTTLQVLNTWYTKQYKPSASNAFMVCGVLYATRTMNTRTEEIFYYYDTNTGKEGKLDIVMHKMQEKVQSINYNPFDQKLYVYNDGYLLNYDLSVLQKPQ

SEQ ID NO: 49 - DNA, 586 bp, Homo sapiens
aaacactctgtgtggctcctcggctttgacagagtgcaagacgatgacttgcaaaatgtcgcagctggaacgcaacatagagaccatcatcaacaccttccaccaatactctgtgaagctggggcacccagacaccctgaaccagggggaattcaaagagctggtgcgaaaagatctgcaaaattttctcaagaaggagaataagaatgaaaaggtcatagaacacatcatggaggacctggacacaaatgcagacaagcagctgagcttcgaggagttcatcatgctgatggcgaggctaacctgggcctcccacgagaagatgcacgagggtgacgagggccctggccaccaccataagccaggcctcggggagggcaccccctaagaccacagtggccaagatcacagtggccacggccacggccacagtcatggtggccacggccacagccactaatcaggaggccaggccaccctgcctctacccaaccagggccccggggcctgttatgtcaaactgtcttggctgtggggctaggggctggggccaaataaagtctcttcctccaagtcaaaaaaaaaa

SEQ ID NO: 50 - protein, 114 aa, Homo sapiens
MTCKMSQLERNIETIINTFHQYSVKLGHPDTLNQGEFKELVRKDLQNFLKKENKNEKVIEHIMEDLDTNADKQLSFEEFIMLMARLTWASHEKMHEGDEGPGHHHKPGLGEGTP

SEQ ID NO: 51 - DNA, 3096 bp, Homo sapiens
gccagcagcctctaagagctcctagacggcctttggctttggctggcacaggggtgaaggagagccagcggcattgagtaaccaggcgaatgtgcccccaggagagttcattccaaccctcccagttcctactgctggtgggggtcccagtggcaagtgtcctccttctggcccaatgccttcgatggcactgccctagaaggctgctgggggcctgctggacactgaatggtcaagaggaaccagtgtcccagcctaccccccaactagaaaatgaggtctcaaggcagcacctgccagccacactgccagagatggttgccttctaccaggagctacacacacccactcaaggccagaccatggtccgccagttgatgcacaaactgttggtgttttcggctcgagaggtggatcaccgcggcggttgcctgatgctccaggatacaggcatctccttgctcatcccaccaggtgctgtggctgtgggccgccaggagcgggtgtctttgatcctggtgtgggacctgtcggacgccccatcgctgtcccaagcccaggggctggtaagccctgtggtggcatgtggcccccatggggcctccttcctgaagccttgcactctcacgttcaaacactgtgccgagcagcccagccatgctcgcacctacagcagcaacactaccctgctggatgccaaggtatggaggcccctggggcggccgggggcccacgcctcccgggatgagtgtcgcatccacctctcccacttcagcctctacacctgtgtgctggaggcacctgtggggcgcgaagcccgcaaatggctgcagctggccgtattctgctcaccgctggtgccaggacagtcccatctgcaactgcgtatctacttcctcaacaacacgccctgcgccctgcagtgggcactgaccaacgagcagccccatggtgggcgcctgcgtgggccctgccagctcttcgacttcaatggggctaggggcgaccagtgcctgaagctcacgtacatctcagagggttgggagaatgtggatgacagcagttgccagctggttccccatctccacatctggcatggaaagtgccccttccgctccttctgcttccggagaaaagcagccgatgagaatgaggactgttcagcactaaccaatgagatcattgtcaccatgcacaccttccaggatggcttggagaccaagtatatggaaatcctcagattccaggcatcagaggaggaatcctgggcagcgccaccacctgtttcccagccgcccccatgcaataggctgcccccagagctctttgagcagctgcggatgttattggagccaaacagcatcaccggcaatgactggcgcggactggcctcccacctggggctttgcggcatgaagatccggttcctgtcctgccagcgcagccccgcagcggccatcctggagttgtttgaggagcagaacggcagcctgcaggagctgcactacctcatgaccgtcatggagcggctagactgcgcctccgccatccagaactacctgagtgggacacacggcggcagcccaggccccgagcgcgggggcgcccgggataaccagggcctggagctggacgagaagctctgagcgcccagcgggcagggccggaggaggtgtaggggcgagaggggttgttctcctacgcctaagaggaacacagcagctgttcctggctgtgcccaccacccttcccagaaccctcggacggtgccagggccgcccgcgtcctcgccagcctcccagcagcaggcgcgcccttccggccgcgagctgtcccgcgtgcgggtcccctcctggccggcagagggcgcaggagcccaggagatggcctcagcgtggccagcctgccaaactgaccaggggacggccacggtccccgcgtgcactttagggccggtcaggccctaaagtattcactgagcacttaggaagaccgggcattgggctggtgtcatgaagaatactggaatataggaggtagggtctggagccctgacaagcacacagttcttttgcaggagtcaagatgtgctcataggagccaagggcaaactcgaaaacagccctgccctgtggttaggggaggtgggtgtggctttaggagttgagaggggaagagctgagtgcgggctggagcagcgagaatgcttcacggaggatgttggggagagaggatttgatttgccgagtggtttggagatctttaggggcgggtaggggaagagggtggctggacttaaggtaggagccgaaagtgggcatgggagcccatccccgtgggtgtgaggccggggtaggaccaggcttcccggctaggcacgcctggctggctgcctctgcctctactaacttcctttgtctctttatcctcctgcttaggccgtgtcttcctctctctctgccattttctctatcagaaaacattaaagctgagtagaaacttcaagatgatcattctggcccagcccttttatctctttatctccaatggtgtgcgttttaagtttctctgacttggtttttctgtccctgtctcccacagttgttcccgctctgcacctgtgtttcagttactctctctctctgtcttagatctttttgtttctgcctagtctctgtgccctgtctttgtgtgtttctttctctgcctgaaaccctccctcttttcccttcaggcatatgtctctaaaccaatgttatgtatcaaagactgttgaaagagacagggctactctaggaatggatgggtggggatattttccccatggatcaagatccagtttagggttgggaaataaaggatagggataaaagaggcaccccattcagtcagcagatacttattcagcacctactatgtgtttgatactgtatacaaaagacatgaatgggctgggtcctgaacagagaataaagggtttgactccaaaaaaaaaaaaaaaaaaaaaaaaaaaaaaaaaaaaaaaaaaaaaaaaaaaaaaaaaaaaaaaaaaaaaaaaaaaaaaaaaaaaaaaaaaaaaaaaaaaaaaaaaaaaaa

SEQ ID NO: 52 - protein, 518 aa, Homo sapiens
MCPQESSFQPSQFLLLVGVPVASVLLLAQCLRWHCPRRLLGACWTLNGQEEPVSQPTPQLENEVSRQHLPATLPEMVAFYQELHTPTQGQTMVRQLMHKLLVFSAREVDHRGGCLMLQDTGISLLIPPGAVAVGRQERVSLILVWDLSDAPSLSQAQGLVSPVVACGPHGASFLKPCTLTFKHCAEQPSHARTYSSNTTLLDAKVWRPLGRPGAHASRDECRIHLSHFSLYTCVLEAPVGREARKWLQLAVFCSPLVPGQSHLQLRIYFLNNTPCALQWALTNEQPHGGRLRGPCQLFDFNGARGDQCLKLTYISEGWENVDDSSCQLVPHLHIWHGKCPFRSFCFRRKAADENEDCSALTNEIIVTMHTFQDGLETKYMEILRFQASEEESWAAPPPVSQPPPCNRLPPELFEQLRMLLEPNSITGNDWRGLASHLGLCGMKIRFLSCQRSPAAAILELFEEQNGSLQELHYLMTVMERLDCASAIQNYLSGTHGGSPGPERGGARDNQGLELDEKL

SEQ ID NO: 53 - DNA, 1437 bp, Homo sapiens
attgctgatggatcagtgagcctgtgttcatgccagtgagctgctgtggctcagatactgatactttctttccaaacagcataagaagtgattgagccacaagtatactgaaggaagggctccctcgagttctggtgtgaagagataaatcaccagtcacagactatgcacccgactgctgctgttcagtccagggaaaatgaaagttggagtgctgtggctcatttctttcttcaccttcactgacggccacggtggcttcctggggaaaaatgatggcatcaaaacaaaaaaagaactcattgtgaataagaaaaaacatctaggcccagtcgaagaatatcagctgctgcttcaggtgacctatagagattccaaggagaaaagagatttgagaaattttctgaagctcttgaagcctccattattatggtcacatgggctaattagaattatcagagcaaaggctaccacagactgcaacagcctgaatggagtcctgcagtgtacctgtgaagacagctacacctggtttcctccctcatgccttgatccccagaactgctaccttcacacggctggagcactcccaagctgtgaatgtcatctcaacaacctcagccagagtgtcaatttctgtgagagaacaaagatttggggcactttcaaaattaatgaaaggtttacaaatgaccttttgaattcatcttctgctatatactccaaatatgcaaatggaattgaaattcaacttaaaaaagcatatgaaagaattcaaggttttgagtcggttcaggtcacccaatttcgaatgtcactcttgtcgcccaagttggagtgcaatggcacaatctaggctcactgcaaccctgcaacctctgcctaccgggttcaagagattcccctgcctcagcctcccaagtagctggaattacaggcacctgccaccacatccagctaactttttttgtatttttactagagacagggtttcaccatgttggccacactggtctcaaactcctgacctcaggtgatccgcctgcctcggcccccaaagtgctgggattacaggcatgagccaccacatctggcctaggaccttaaatattggaaagcatcctcaaaactgtgggtcagtgagtagaactacaaaacaatagcagtagggcagaaacttgaaagaaggcaggagatcatggtgacagtggatgggaaaaagtgagggttggggataagggttgcgggttgtcgaagggtggattttctccttcagcaactacaggagatatgatgcctcataattcggagccagaagtggggctttgggtgagatatctttgcacagataacatgtatacatcatagttcaaaacccagtagtcattgtttacagcaaataaagaaatatttagtaaattaaaaaaaaaaaaaaaa

SEQ ID NO: 54 - protein, 218 aa, Homo sapiens
MKVGVLWLISFFTFTDGHGGFLGKNDGIKTKKELIVNKKKHLGPVEEYQLLLQVTYRDSKEKRDLRNFLKLLKPPLLWSHGLIRIIRAKATTDCNSLNGVLQCTCEDSYTWFPPSCLDPQNCYLHTAGALPSCECHLNNLSQSVNFCERTKIWGTFKINERFTNDLLNSSSAIYSKYANGIEIQLKKAYERIQGFESVQVTQFRMSLLSPKLECNGTI

SEQ ID NO: 55 - DNA, 1096 bp, Homo sapiens
atggtgctcatggcgccccgaaccctcctcctgctgctctcaggggccctggccctgacccagacctgggcgcgctcccactccatgaggtatttctacaccaccatgtcccggcccggccgcggggagccccgcttcatctccgtcggctacgtggacgatacgcagttcgtgcggttcgacagcgacgccgcgagccagaggatggagccgcgggcgccgtggatggagcgggaggggccggagtattgggaccggaacacacagatctgcaaggcccaggcacagactgaacgagagaacctgcggatcgcgctccgctactacaaccagagcgagggcggttctcacaccatgcaggtgatgtatggctgcgacgtggggcccgacgggcgcttcctccgcgggtatgaacagcacgcctacgacagcaaggattacatcgctctgaacgaggacctgcgctcctggaccgcggcggacatggcagctcagatcaccaagcgcaagtgggaggcggcccgtcaggcggagcagctgagagcctacctggagggcgagttcgtggagtggctccgcagatacctggagaacgggaaggagacgctgcagcgcgcggacccccccaagacacatatgacccaccaccccatctctgaccatgaggccaccctgaggtgctgggccctgggcttctaccctgcggagatcacactgacctggcagcgggatggggaggaccagacccacacacggagctcatggagaccaggcctgcaggggatggaaccttccagaagtgggcggctgtggtggtgccttctggagaggagcagagatacacctgccatgtgcagcatgagggtctgccagagcccctcaccctgagatgggagccatcttcccagcccaccatccccatcgtgggcatcgttgctggcctggttctacttgtagctgtggtcactggagctgtggtcgctgctgtaatgtggaggaagaagagctcagatagaaaaggagggagctactctcaggctgcaagcggcaacagtgcccagggctctgatgtgtctctcacggcgtgaaagtgtga

SEQ ID NO: 56 - protein, 295 aa, Homo sapiens
MVLMAPRTLLLLLSGALALTQTWARSHSMRYFYTTMSRPGRGEPRFISVGYVDDTQFVRFDSDAASQRMEPRAPWMEREGPEYWDRNTQICKAQAQTERENLRIALRYYNQSEGGSHTMQVMYGCDVGPDGRFLRGYEQHAYDSKDYIALNEDLRSWTAADMAAQITKRKWEAARQAEQLRAYLEGEFVEWLRRYLENGKETLQRADPPKTHMTHHPISDHEATLRCWALGFYPAEITLTWQRDGEDQTHTRSSWRPGLQGMEPSRSGRLWWCLLERSRDTPAMCSMRVCQSPSP

SEQ ID NO: 57 - DNA, 2974 bp, Homo sapiens
gtgtgcgtgatggagaaaattgggcaccagggctgctcccgagattctcagatctgatttccacgcttgctaccaaaatagtctgggcaggccacttttggaagtaggcgttatctagtgagcaggcggccgctttcgatttcgctttcccctaaatggctgagcttctcgccagcgcaggatcagcctgttcctgggactttccgagagccccgccctcgttccctcccccagccgccagtaggggaggactcggcggtacccggagcttcaggccccaccggggcgcggagagtcccaggcccggccgggaccgggacggcgtccgagtgccaatggctagctctaggtgtcccgctccccgcgggtgccgctgcctccccggagcttctctcgcatggctggggacagtactgctacttctcgccgactgggtgctgctccggaccgcgctgccccgcatattctccctgctggtgcccaccgcgctgccactgctccgggtctgggcggtgggcctgagccgctgggccgtgctctggctgggggcctgcggggtcctcagggcaacggttggctccaagagcgaaaacgcaggtgcccagggctggctggctgctttgaagccattagctgcggcactgggcttggccctgccgggacttgccttgttccgagagctgatctcatggggagcccccgggtccgcggatagcaccaggctactgcactggggaagtcaccctaccgccttcgttgtcagttatgcagcggcactgcccgcagcagccctgtggcacaaactcgggagcctctgggtgcccggcggtcagggcggctctggaaaccctgtgcgtcggcttctaggctgcctgggctcggagacgcgccgcctctcgctgttcctggtcctggtggtcctctcctctcttggggagatggccattccattctttacgggccgcctcactgactggattctacaagatggctcagccgataccttcactcgaaacttaactctcatgtccattctcaccatagccagtgcagtgctggagttcgtgggtgacgggatctataacaacaccatgggccacgtgcacagccacttgcagggagaggtgtttggggctgtcctgcgccaggagacggagtttttccaacagaaccagacaggtaacatcatgtctcgggtaacagaggacacgtccaccctgagtgattctctgagtgagaatctgagcttatttctgtggtacctggtgcgaggcctatgtctcttggggatcatgctctggggatcagtgtccctcaccatggtcaccctgatcaccctgcctctgcttttccttctgcccaagaaggtgggaaaatggtaccagttgctggaagtgcaggtgcgggaatctctggcaaagtccagccaggtggccattgaggctctgtcggccatgcctacagttcgaagctttgccaacgaggagggcgaagcccagaagtttagggaaaagctgcaagaaataaagacactcaaccagaaggaggctgtggcctatgcagtcaactcctggaccactagtatttcaggtatgctgctgaaagtgggaatcctctacattggtgggcagctggtgaccagtggggctgtaagcagtgggaaccttgtcacatttgttctctaccagatgcagttcacccaggctgtggaggtactgctctccatctaccccagagtacagaaggctgtgggctcctcagagaaaatatttgagtacctggaccgcacccctcgctgcccacccagtggtctgttgactcccttacacttggagggccttgtccagttccaagatgtctcctttgcctacccaaaccgcccagatgtcttagtgctacaggggctgacattcaccctacgccctggcgaggtgacggcgctggtgggacccaatgggtctgggaagagcacagtggctgccctgctgcagaatctgtaccagcccaccgggggacagctgctgttggatgggaagccccttccccaatatgagcaccgctacctgcacaggcaggtggctgcagtgggacaagagccacaggtatttggaagaagtcttcaagaaaatattgcctatggcctgacccagaagccaactatggaggaaatcacagctgctgcagtaaagtctggggcccatagtttcatctctggactccctcagggctatgacacagaggtagacgaggctgggagccagctgtcagggggtcagcgacaggcagtggcgttggcccgagcattgatccggaaaccgtgtgtacttatcctggatgatgccaccagtgccctggatgcaaacagccagttacaggtggagcagctcctgtacgaaagccctgagcggtactcccgctcagtgcttctcatcacccagcacctcagcctggtggagcaggctgaccacatcctctttctggaaggaggcgctatccgggaggggggaacccaccagcagctcatggagaaaaaggggtgctactgggccatggtgcaggctcctgcagatgctccagaatgaaagccttctcagacctgcgcactccatctccctcccttttcttctctctgtggtggagaaccacagctgcagagtaggcagctgcctccaggatgagttacttgaaatttgccttgagtgtgttacctcctttccaagctcctcgtgataatgcagacttcctggagtacaaacacaggatttgtaattccttactgtaacggagtttagagccagggctgatgctttggtgtggccagcactctgaaactgagaaatgttcagaatgtacggaaagatgatcagctattttcaacataactgaaggcatatgctggcccataaacaccctgtaggttcttgatatttataataaaattggtgttttgtaaaaaaaaaaaaaaaaaaaaaaa

SEQ ID NO: 58 - protein, 808 aa, Homo sapiens
MAELLASAGSACSWDFPRAPPSFPPPAASRGGLGGTRSFRPHRGAESPRPGRDRDGVRVPMASSRCPAPRGCRCLPGASLAWLGTVLLLLADWVLLRTALPRIFSLLVPTALPLLRVWAVGLSRWAVLWLGACGVLRATVGSKSENAGAQGWLAALKPLAAALGLALPGLALFRELISWGAPGSADSTRLLHWGSHPTAFVVSYAAALPAAALWHKLGSLWVPGGQGGSGNPVRRLLGCLGSETRRLSLFLVLVVLSSLGEMAIPFFTGRLTDWILQDGSADTFTRNLTLMSILTIASAVLEFVGDGIYNNTMGHVHSHLQGEVFGAVLRQETEFFQQNQTGNIMSRVTEDTSTLSDSLSENLSLFLWYLVRGLCLLGIMLWGSVSLTMVTLITLPLLFLLPKKVGKWYQLLEVQVRESLAKSSQVAIEALSAMPTVRSFANEEGEAQKFREKLQEIKTLNQKEAVAYAVNSWTTSISGMLLKVGILYIGGQLVTSGAVSSGNLVTFVLYQMQFTQAVEVLLSIYPRVQKAVGSSEKIFEYLDRTPRCPPSGLLTPLHLEGLVQFQDVSFAYPNRPDVLVLQGLTFTLRPGEVTALVGPNGSGKSTVAALLQNLYQPTGGQLLLDGKPLPQYEHRYLHRQVAAVGQEPQVFGRSLQENIAYGLTQKPTMEEITAAAVKSGAHSFISGLPQGYDTEVDEAGSQLSGGQRQAVALARALIRKPCVLILDDATSALDANSQLQVEQLLYESPERYSRSVLLITQHLSLVEQADHILFLEGGAIREGGTHQQLMEKKGCYWAMVQAPADAPE

SEQ ID NO: 59 - DNA, 3096 bp, Homo sapiens
cgggcgcccagagggcaaatgaggggcggcggggtggcgggtcggggggagacgcggaatttcccagcgcgggggctctggcttaccctgcaaccgggcagtctctttctgtttacggagagaaaggggaaatggaaaagtcggggaggcggtggctggcgtccgctgcgccgcccctgggcaggctcagacgccgtgagtcaggggcagagcagggcggtctgagcgtgcgggcgacgcgggtctcactcgtccgctccgctctggactgcgcgccacgctctggggtccggcgccctggttcctgcttctgccgctgccgccgccggatcccagtggcccggcgtgctcggctcccacaggcctgcagccagcatcgcaccgaaccttcggggggccgcggctggagcgctcggccggcgtgggagcgccaaggccgcagatgcaatcttcttaccgcgaagaagccaggggaataggtagccacatcttgtttgcagataagaaaggaagctaacgcagtatctgcaaagccaggagtctgactcagtacttttctcactcatgcatacaaagcagctaaaaatgacacagcttatttaccatgcccctgacactgcactgagcactttatgagcttgaactctgttaatcctcacgaccacctcatgagactctccagaaagagcaacagtaatggagtacatgagcactggaagtgacaataaagaagagattgatttattaattaaacatttaaatgtgtctgatgtaatagacattatggaaaatctttatgcaagtgaagagccagcagtttatgaacccagtctaatgaccatgtgtcaagacagtaatcaaaacgatgagcgttctaagtctctgctgcttagtggccaagaggtaccatggttgtcatcagtcagatatggaactgtggaggatttgcttgcttttgcaaaccatatatccaacactgcaaagcatttttatggacaacgaccacaggaatctggaattttattaaacatggtcatcactccccaaaatggacgttaccaaatagattccgatgttctcctgatcccctggaagctgacttacaggaatattggttctgattttattcctcggggcgcctttggaaaggtatacttggcacaagatataaagacgaagaaaagaatggcgtgtaaactgatcccagtagatcaatttaagccatctgatgtggaaatccaggcttgcttccggcacgagaacatcgcagagctgtatggcgcagtcctgtggggtgaaactgtccatctctttatggaagcaggcgagggagggtctgttctggagaaactggagagctgtggaccaatgagagaatttgaaattatttgggtgacaaagcatgttctcaagggacttgattttctacactcaaagaaagtgatccatcatgatattaaacctagcaacattgttttcatgtccacaaaagctgttttggtggattttggcctaagtgttcaaatgaccgaagatgtctattttcctaaggacctccgaggaacagagatttacatgagcccagaggtcatcctgtgcaggggccattcaaccaaagcagacatctacagcctgggggccacgctcatccacatgcagacgggcaccccaccctgggtgaagcgctaccctcgctcagcctatccctcctacctgtacataatccacaagcaagcacctccactggaagacattgcagatgactgcagtccagggatgagagagctgatagaagcttccctggagagaaaccccaatcaccgcccaagagccgcagacctactaaaacatgaggccctgaacccgcccagagaggatcagccacgctgtcagagtctggactctgccctcttggagcgcaagaggctgctgagtaggaaggagctggaacttcctgagaacattgctgattcttcgtgcacaggaagcaccgaggaatctgagatgctcaagaggcaacgctctctctacatcgacctcggcgctctggctggctacttcaatcttgttcggggaccaccaacgcttgaatatggctgaaggatgccatgtttgctctaaattaagacagcattgatctcctggaggctggttctgctgcctctacacaggggccctgtacagtgaatggtgccattttcgaaggagcagtgtgacctcctgtgacccatgaatgtgcctccaagcggccctgtgtgtttgacatgtgaagctatttgatatgcaccaggtctcaaggttctcatttctcaggtgacgtgattctaaggcaggaatttgagagttcacagaaggatcgtgtctgctgactgtttcattcactgtgcactttgctcaaaattttaaaaataccaatcacaaggataatagagtagcctaaaattactattcttggttcttatttaagtatggaatattcattttactcagaatagctgttttgtgtatattggtgtatattatataactctttgagcctttattggtaaattctggtatacattgaattcattataatttgggtgactagaacaacttgaagattgtagcaataagctggactagtgtcctaaaaatggctaactgatgaattagaagccatctgacagcaggccactagtgacagtttcttttgtgttcctatggaaacattttatactgtacatgctatgctgaagacattcaaaacgtgatgttttgaatgtggataaaactgtgtaaaccacataatttttgtacatcccaaaggatgagaatgtgacctttaagaaaaatgaaaacttttgtaaattattgatgattttgtaattcttatgactaaattttcttttaagcatttgtatattaaaatagcatactgtgtatgttttatatcaaatgccttcatgaatctttcatacatatatatatttgtaacattgtaaagtatgtgagtagtcttatgtaaagtatgtttttacattatgcaaataaaacccaatacttttgtccaatgtggttggtcaaatcaactgaataaattcagtattttgcctt

SEQ ID NO: 60 - protein, 467 aa, Homo sapiens
MEYMSTGSDNKEEIDLLIKHLNVSDVIDIMENLYASEEPAVYEPSLMTMCQDSNQNDERSKSLLLSGQEVPWLSSVRYGTVEDLLAFANHISNTAKHFYGQRPQESGILLNMVITPQNGRYQIDSDVLLIPWKLTYRNIGSDFIPRGAFGKVYLAQDIKTKKRMACKLIPVDQFKPSDVEIQACFRHENIAELYGAVLWGETVHLFMEAGEGGSVLEKLESCGPMREFEIIWVTKHVLKGLDFLHSKKVIHHDIKPSNIVFMSTKAVLVDFGLSVQMTEDVYFPKDLRGTEIYMSPEVILCRGHSTKADIYSLGATLIHMQTGTPPWVKRYPRSAYPSYLYIIHKQAPPLEDIADDCSPGMRELIEASLERNPNHRPRAADLLKHEALNPPREDQPRCQSLDSALLERKRLLSRKELELPENIADSSCTGSTEESEMLKRQRSLYIDLGALAGYFNLVRGPPTLEYG

SEQ ID NO: 61 - DNA, 4445 bp, Homo sapiens
cgctccccgctcccgtggctgccgccgccccggggaagaagagacaggggtggggtttgggggaagcgagagaggaggggagagaccctggccaggctggagcctggattcgaggggaggagggacgggaggaggagaaaggtggaggagaagggaggggggagcggggaggagcggccgggcctggggccttgaggcccggggagagccggggagccgggcccgcgcgccgagatgttgctgctgctgttactggcgccactcttcctccgccccccgggcgcgggcggggcgcagacccccaacgccacctcagaaggttgccagatcatacacccgccctgggaagggggcatcaggtaccggggcctgactcgggaccaggtgaaggctatcaacttcctgccagtggactatgagattgagtatgtgtgccggggggagcgcgaggtggtggggcccaaggtccgcaagtgcctggccaacggctcctggacagatatggacacacccagccgctgtgtccgaatctgctccaagtcttatttgaccctggaaaatgggaaggttttcctgacgggtggggacctcccagctctggacggagcccgggtggatttccggtgtgaccccgacttccatctggtgggcagctcccggagcatctgtagtcagggccagtggagcacccccaagccccactgccaggtgaatcgaacgccacactcagaacggcgcgcagtgtacatcggggcactgtttcccatgagcgggggctggccagggggccaggcctgccagcccgcggtggagatggcgctggaggacgtgaatagccgcagggacatcctgccggactatgagctcaagctcatccaccacgacagcaagtgtgatccaggccaagccaccaagtacctatatgagctgctctacaacgaccctatcaagatcatccttatgcctggctgcagctctgtctccacgctggtggctgaggctgctaggatgtggaacctcattgtgctttcctatggctccagctcaccagccctgtcaaaccggcagcgtttccccactttcttccgaacgcacccatcagccacactccacaaccctacccgcgtgaaactctttgaaaagtggggctggaagaagattgctaccatccagcagaccactgaggtcttcacttcgactctggacgacctggaggaacgagtgaaggaggctggaattgagattactttccgccagagtttcttctcagatccagctgtgcccgtcaaaaacctgaagcgccaggatgcccgaatcatcgtgggacttttctatgagactgaagcccggaaagttttttgtgaggtgtacaaggagcgtctctttgggaagaagtacgtctggttcctcattgggtggtatgctgacaattggttcaagatctacgacccttctatcaactgcacagtggatgagatgactgaggcggtggagggccacatcacaactgagattgtcatgctgaatcctgccaatacccgcagcatttccaacatgacatcccaggaatttgtggagaaactaaccaagcgactgaaaagacaccctgaggagacaggaggcttccaggaggcaccgctggcctatgatgccatctgggccttggcactggccctgaacaagacatctggaggaggcggccgttctggtgtgcgcctggaggacttcaactacaacaaccagaccattaccgaccaaatctaccgggcaatgaactcttcgtcctttgagggtgtctctggccatgtggtgtttgatgccagcggctctcggatggcatggacgcttatcgagcagcttcagggtggcagctacaagaagattggctactatgacagcaccaaggatgatctttcctggtccaaaacagataaatggattggagggtcccccccagctgaccagaccctggtcatcaagacattccgcttcctgtcacagaaactctttatctccgtctcagttctctccagcctgggcattgtcctagctgttgtctgtctgtcctttaacatctacaactcacatgtccgttatatccagaactcacagcccaacctgaacaacctgactgctgtgggctgctcactggctttagctgctgtcttccccctggggctcgatggttaccacattgggaggaaccagtttcctttcgtctgccaggcccgcctctggctcctgggcctgggctttagtctgggctacggttccatgttcaccaagatttggtgggtccacacggtcttcacaaagaaggaagaaaagaaggagtggaggaagactctggaaccctggaagctgtatgccacagtgggcctgctggtgggcatggatgtcctcactctcgccatctggcagatcgtggaccctctgcaccggaccattgagacatttgccaaggaggaacctaaggaagatattgacgtctctattctgccccagctggagcattgcagctccaggaagatgaatacatggcttggcattttctatggttacaaggggctgctgctgctgctgggaatcttccttgcttatgagaccaagagtgtgtccactgagaagatcaatgatcaccgggctgtgggcatggctatctacaatgtggcagtcctgtgcctcatcactgctcctgtcaccatgattctgtccagccagcaggatgcagcctttgcctttgcctctcttgccatagttttctcctcctatatcactcttgttgtgctctttgtgcccaagatgcgcaggctgatcacccgaggggaatggcagtcggaggcgcaggacaccatgaagacagggtcatcgaccaacaacaacgaggaggagaagtcccggctgttggagaaggagaaccgtgaactggaaaagatcattgctgagaaagaggagcgtgtctctgaactgcgccatcaactccagtctcggcagcagctccgctcccggcgccacccaccgacacccccagaaccctctgggggcctgcccaggggaccccctgagccccccgaccggcttagctgtgatgggagtcgagtgcatttgctttataagtgagggtagggtgagggaggacaggccagtagggggagggaaagggagaggggaagggcaggggactcaggaagcagggggtccccatccccagctgggaagaacatgctatccaatctcatctcttgtaaatacatgtccccctgtgagttctgggctgatttgggtctctcatacctctgggaaacagacctttttctctcttactgcttcatgtaattttgtatcacctcttcacaatttagttcgtacctggcttgaagctgctcactgctcacacgctgcctcctcagcagcctcactgcatctttctcttcccatgcaacaccctcttctagttaccacggcaacccctgcagctcctctgcctttgtgctctgttcctgtccagcaggggtctcccaacaagtgctctttccaccccaaaggggcctctccttttctccactgtcataatctctttccatcttacttgcccttctatactttctcacatgtggctccccctgaattttgcttcctttgggagctcattcttttcgccaaggctcacatgctccttgcctctgctctgtgcactcacgctcagcacacatgcatcctcccctctcctgcgtgtgcccactgaacatgctcatgtgtacacacgcttttcccgtatgctttcttcatgttcagtcacatgtgctctcgggtgccctgcattcacagctacgtgtgcccctctcatggtcatgggtctgcccttgagcgtgtttgggtaggcatgtgcaatttgtctagcatgctgagtcatgtctttcctatttgcacacgtccatgtttatccatgtactttccctgtgtaccctccatgtaccttgtgtactttcttcccttaaatcatggtattcttctgacagagccatatgtaccctaccctgcacattgttatgcacttttccccaattcatgtttggtggggccatccacaccctctccttgtcacagaatctccatttctgctcagattccccccatctccattgcattcatgtactaccctcagtctacactcacaatcatcttctcccaagactgctcccttttgttttgtgtttttttgaggggaattaaggaaaaataagtgggggcaggtttggagagctgcttccagtggatagttgatgagaatcctgaccaaaggaaggcacccttgactgttgggatagacagatggacctatggggtgggaggtggtgtccctttcacactgtggtgtctcttggggaaggatctccccgaatctcaataaaccagtgaacagtgtgactcggcaaaaaaaaaaa

SEQ ID NO: 62 - protein, 961 aa, Homo sapiens
MLLLLLLAPLFLRPPGAGGAQTPNATSEGCQIIHPPWEGGIRYRGLTRDQVKAINFLPVDYEIEYVCRGEREVVGPKVRKCLANGSWTDMDTPSRCVRICSKSYLTLENGKVFLTGGDLPALDGARVDFRCDPDFHLVGSSRSICSQGQWSTPKPHCQVNRTPHSERRAVYIGALFPMSGGWPGGQACQPAVEMALEDVNSRRDILPDYELKLIHHDSKCDPGQATKYLYELLYNDPIKIILMPGCSSVSTLVAEAARMWNLIVLSYGSSSPALSNRQRFPTFFRTHPSATLHNPTRVKLFEKWGWKKIATIQQTTEVFTSTLDDLEERVKEAGIEITFRQSFFSDPAVPVKNLKRQDARIIVGLFYETEARKVFCEVYKERLFGKKYVWFLIGWYADNWFKIYDPSINCTVDEMTEAVEGHITTEIVMLNPANTRSISNMTSQEFVEKLTKRLKRHPEETGGFQEAPLAYDAIWALALALNKTSGGGGRSGVRLEDFNYNNQTITDQIYRAMNSSSFEGVSGHVVFDASGSRMAWTLIEQLQGGSYKKIGYYDSTKDDLSWSKTDKWIGGSPPADQTLVIKTFRFLSQKLFISVSVLSSLGIVLAVVCLSFNIYNSHVRYIQNSQPNLNNLTAVGCSLALAAVFPLGLDGYHIGRNQFPFVCQARLWLLGLGFSLGYGSMFTKIWWVHTVFTKKEEKKEWRKTLEPWKLYATVGLLVGMDVLTLAIWQIVDPLHRTIETFAKEEPKEDIDVSILPQLEHCSSRKMNTWLGIFYGYKGLLLLLGIFLAYETKSVSTEKINDHRAVGMAIYNVAVLCLITAPVTMILSSQQDAAFAFASLAIVFSSYITLVVLFVPKMRRLITRGEWQSEAQDTMKTGSSTNNNEEEKSRLLEKENRELEKIIAEKEERVSELRHQLQSRQQLRSRRHPPTPPEPSGGLPRGPPEPPDRLSCDGSRVHLLYK

SEQ ID NO: 63 - DNA, 1872 bp, Homo sapiens
gtacttacacaaccccagatggtacaacctacaacacacctaggctgtatgatgtagccaattgctcctagactacaaatctatacagcatgttgctgtactgaatactctaagcaattataacacaatgacctagcaacagtaacataagcaaaggagagtcacgcccaaaatggaaacccaaagccaaagtaccccttcagactctacatatgacttctgagaatcaagagaaagtgaaagctcttctccgagacctgcaagaacaagatgctgatgctggatctgaaagaggcctttctggggaggaggaagatgatgagcctgattgctgtaacgatgagcggtactggccagctggacaggaaccttccctcgttcccgacttggatcctttggaatatgctggcttagcctcagtggagccttatgttccagaatttacagtctccccatttgcagtgcaaaaactttccaggtatggtttcaatactgaacgctgtcaagcggtcctgaggatgtgtgatggagatgtgggagcatcactagagcatctccttacccagtgtttttcagagacatttggagagaggatgaagatctctgaggcagtcaaccagataagcttggatgagtgtatggaacagcgacaggaagaggcatttgctctcaagtccatctgtggagaaaaatttatagaaagaattcagaacagagtctggaccattgggttagaactggagtatctgacaagtagattccgcaaatccaagccaaaagaaagtaccaaaaatgtacaagagaattcacttgaaatctgtaaattttacctcaaaggaaattgtaaatttggatcaaaatgcagattcaaacatgaagtgcccccaaatcaaattgttggaagaatagaaagaagtgtagatgattctcatcttaatgctattgaagatgcatcttttttatatgaacttgaaattcgattttctaaagaccacaaatatccctaccaagctccgctcgtggcattttattccaccaatgagaacctacctctggcttgtcgtttacatatttctgagtttctttatgacaaggccttgacatttgcggaaacttcggaacctgtcgtatattctttgataacccttttagaggaagagtcggaaatagtcaagttactaacgaatacccaccacaagtatagtgaccctcctgtgaactttctgccagtaccctctaggaccagaataaataatcctgcctgtcataaaacagtgattccaaataattcttttgtttctaatcaaattccagaagttgaaaaagcatcagaatctgaggagtcagatgaggatgacggtcctgcacctgttatagtagagaatgaaagctatgtgaaccttaagaaaaagatttccaaaagatatgactggcaggcaaagtcagtacatgctgaaaatggtaaaatctgcaagcagttccgaatgaaacaggtgctcaatagccacatgtagccaggtgttgctgtattggacagcacaggtatagaacatttccatcaacacggaaagttctattggacagtactggtatagagactcttgttgggaagaactggatatgtgctaagcaagagggctttatttcacccagaaaatctttcggtttattcagatgttggaaaactaatgtacagattccacaactcattctggctgattctctgagcagcattctgaataaagtcttctacatccaatcccaacaaatccaacaaaggatcactcaaggccaggagtgcaagaccatccagggcaacataacaagactctgtctctataattaaaaaaaaaaaaaagctgtaatcccaaa

SEQ ID NO: 64 - protein, 433 aa, Homo sapiens
MTSENQEKVKALLRDLQEQDADAGSERGLSGEEEDDEPDCCNDERYWPAGQEPSLVPDLDPLEYAGLASVEPYVPEFTVSPFAVQKLSRYGFNTERCQAVLRMCDGDVGASLEHLLTQCFSETFGERMKISEAVNQISLDECMEQRQEEAFALKSICGEKFIERIQNRVWTIGLELEYLTSRFRKSKPKESTKNVQENSLEICKFYLKGNCKFGSKCRFKHEVPPNQIVGRIERSVDDSHLNAIEDASFLYELEIRFSKDHKYPYQAPLVAFYSTNENLPLACRLHISEFLYDKALTFAETSEPVVYSLITLLEEESEIVKLLTNTHHKYSDPPVNFLPVPSRTRINNPACHKTVIPNNSFVSNQIPEVEKASESEESDEDDGPAPVIVENESYVNLKKKISKRYDWQAKSVHAENGKICKQFRMKQVLNSHM

SEQ ID NO: 65 - DNA, 2186 bp, Homo sapiens
agtaaggagaaccagccaggcagaacatcacagcgggaggagctgtcccaggtggcccagctcagcaatggcaatgggggtccccagagtcattctgctctgcctctttggggctgcactctgcctgacagggtcccaagccctgcagtgctacagctttgagcacacctactttggcccctttgacctcagggccatgaagctgcccagcatctcctgtcctcatgagtgctttgaggctatcctgtctctggacaccgggtatcgcgcgccggtgaccctggtgcggaagggctgctggaccgggcctcctgcgggccagacgcaatcgaacgcggacgcgctgccgccagactactcggtggtgcgcggctgcacaactgacaaatgcaacgcccacctcatgactcatgacgccctccccaacctgagccaagcacccgacccgccgacgctcagcggcgccgagtgctacgcctgtatcggggtccaccaggatgactgcgctatcggcaggtcccgacgagtccagtgtcaccaggaccagaccgcctgcttccagggcaatggcagaatgacagttggcaatttctcagtccctgtgtacatcagaacctgccaccggccctcctgcaccaccgagggcagcaccagcccctggacagccatcgacctccagggctcctgctgtgaggggtacctctgcaacaggaaatccatgacccagcccttcaccagtgcttcagccaccacccctccccgagcactacaggtcctggccctgctcctcccagtcctcctgctggtggggctctcagcatagaccgcccctccaggatgctggggacagggctcacacacctcattcttgctgcttcagcccctatcacatagctcactggaaaatgatgttaaagtaagaattgcactcctgtccctctggccttccatctctcccgcccttgtgccccacaacctggccaacagtactggaagaaactggacacagtcaccagcatccccggggagggcaaaacagccatgtcgtgccctgatgaagagcaattctgatcacagctgttactcactgagcaccagccaggcaccaggcaccccataacacggcttcctgtgctctccctccagagcctgtcgcagctctaggagggagctatacaatgatgtctttattagtgtcatcatgagaagcccaataagcagtatgccctaacagttagtaggccaggctctggagctaagctgcatgggttcaaatcccagctccaccattcagcctgcagagaccatgagcgagttacttaagccaggctctggagctaagctgcatgggttcaaatcccagctccagcattcagcctacagagaccatgggtgagttacttaagccaggctctggagctaagctgcatgggttcaaatcccagctccaccattcagcctgcagagactgtgggtgagttacttgagctctctgtgccaatattttctcacctataaggtggaggtgaaaataaactctataacatgacaagaactacttcacagtagttgcagtgaggattcaacgagatgaacatttagtacttgggacacagcagtggcccagtgtaaatgggctacttgtcataagccctaagtcacaggtcaacaaactgagaggcaaaagcacttggttgagcttgtgtatctagtgagtatggattcagggaccagattcccagccccacgaactgctaagcaaccccacctcctaaacacatgagtgccgattaacttcacagaaaaacacacaaggcaaagttcagcgaggtgaaattctccaagctataaagatcagggaagacttcctggaggaattcacccttgagcaaaatcctaaaggatcaatagtagctggcaaaaagaagcaggaggaagcgcattctaggtagaggagacagcctggacaaaggtctgagggaggaaggagcacaaggagtgcaggacactttcatgagtgcaggacactttcataactgcatgaacttcatagagatgggatcctttagcatgttctctgtgcacatgcttgaccatgttctttcacatgctttttgccacttgatctttccagcaactcagtgagagaagcaaaaaagtaagttgcatccaaaaaaaaaaaaaaa

SEQ ID NO: 66 - protein, 208 aa, Homo sapiens
MKLPSISCPHECFEAILSLDTGYRAPVTLVRKGCWTGPPAGQTQSNADALPPDYSVVRGCTTDKCNAHLMTHDALPNLSQAPDPPTLSGAECYACIGVHQDDCAIGRSRRVQCHQDQTACFQGNGRMTVGNFSVPVYIRTCHRPSCTTEGSTSPWTAIDLQGSCCEGYLCNRKSMTQPFTSASATTPPRALQVLALLLPVLLLVGLSA

SEQ ID NO: 67 - DNA, 3143 bp, Homo sapiens
ggcacgaggcccagcactagaagtcggcggtgtttcctttcggtgatcagcactgaacacagaggactcgccatggagtttgggctgagctgggttttcctcgttgctcttttaagaggtgtccagtgtcaggcgcagttggtggagtctgggggaggcgtggtccagcccgggagctccctgagactctcctgtgcagcctctggtttcaggttcagcaattatggcatgcactgggtccgccaggctccaggcaaggggctggagtgggtggcagttttttcatatgatgaaagtgataaatattatgcagcctccgtgaagggtcgatttaccatctccagagacaactccaagaacacgttgtctctgcaaatgaacagcctgagagttgaggacacggctgtttactactgtgcgaaagatcagaagccctggtacagcaacagctggtttctaaccaactttgactcttggggccggggcaccctggtcaccgtctcctcagcctccaccaagggcccatcggtcttccccctggcaccctcctccaagagcacctctgggggcacagcggccctgggctgcctggtcaaggactacttccccgaaccggtgacggtgtcgtggaactcaggcgccctgaccagcggcgtgcacaccttcccggctgtcctacagtcctcaggactctactccctcagcagcgtggtgaccgtgccctccagcagcttgggcacccagacctacatctgcaacgtgaatcacaagcccagcaacaccaaggtggacaagaaagttgagcccaaatcttgtgacaaaactcacacatgcccaccgtgcccagcacctgaactcctggggggaccgtcagtcttcctcttccccccaaaacccaaggacaccctcatgatctcccggacccctgaggtcacatgcgtggtggtggacgtgagccacgaagaccctgaggtcaagttcaactggtacgtggacggcgtggaggtgcataatgccaagacaaagccgcgggaggagcagtacaacagcacgtaccgtgtggtcagcgtcctcaccgtcctgcaccaggactggctgaatggcaaggagtacaagtgcaaggtctccaacaaagccctcccagcccccatcgagaaaaccatctccaaagccaaagggcagccccgagaaccacaggtgtacaccctgcccccatcccgggatgagctgaccaagaaccaggtcagcctgacctgcctggtcaaaggcttctatcccagcgacatcgccgtggagtgggagagcaatgggcagccggagaacaactacaagaccacgcctcccgtgctggactccgacggctccttcttcctctacagcaagctcaccgtggacaagagcaggtggcagcaggggaacgtcttctcatgctccgtgatgcatgaggctctgcacaaccactacacgcagaagagcctctccctgtctccggagctgcaactggaggagagctgtgcggaggcgcaggacggggagctggacgggctgtggacgaccatcaccatcttcatcacactcttcctgttaagcgtgtgctacagtgccaccgtcaccttcttcaaggtgaagtggatcttctcctcggtggtggacctgaagcagaccatcatccccgactacaggaacatgatcggacagggggcctagggccaccctctgcggggtgtccagggccgcccagaccccacacaccagccatgggccatgctcagccaccacccaggccacacctgcccccgacctcaccgccctcaaccccatggctctctggcctcgcagttgccctctgaccctgacacacctgacacgccccccttccagaccctgtgcatagcaggtctaccccagacctccgctgcttggtgcatgcagggcactgggggccaggtgtcccctcagcaggacatccttgccctccggaccacaaggtgctcacacaaaaggaggcagtgaccggtatcccaggcccccacccaggcaggagctggccctggagccaaccccgtccacgccagcctcctgaacacaggcgtggtttccagatggtgagtgggagcatcagccgccaaggtagggaagccacagcaccatcaggccctgttggggaggcttccgagagctgcgaaggctcactcagacggccttcctcccagcccgcagccagccagcctccattccgggcactcccgtgaactcctgacatgaggaatgaggttgttctgatttcaagcaaagaacgctgctctctggctcctgggaacagtctcggtgccagcaccaccccttggctgcctgcccacactgctggattctcgggtggaactggacccgcagggacagccagccccagagtccgcactggggagagaaggggccaggcccaggacactgccacctcccacccactccagtccaccgagatcactcagagaagagcctgggccatgtggccgctgcaggagccccacagtgcaagggtgaggatagcccaaggaagggctgggcatctgcccagacaggcctcccagagaaggctggtgaccaggtcccaggcgggcaagactcagccttggtggggcctgaggacagaggaggcccaggagcatcggggagagaggtggagggacaccgggagagccaggagcgtggacacagccagaactcatcacagaggctggcgtccagtcccgggtcacgtgcagcaggaacaagcagccactctgggggcaccaggtggagaggcaagacgacaaagagggtgcccgtgttcttgcgaaagcggggctgctggccacgagtgctggacagaggcccccacgctctgctgcccccatcacgccgttccgtgactgtcacgcagaatccgcagacaggaagggagactcgagcgggagtgcggccagcgcctgcctcggccgtcagggaggactcccgggctcactcgaaggaggtgccaccatttcagctttggtagcttttcttcttcttttaaattttctaaagctcattaattgtctttgatgtttcttttgtgatgacaataaaatatcctttttaagtcttgtaaaaaaaaaaaaaaaaaa

SEQ ID NO: 68 - protein, 544 aa, Homo sapiens
MEFGLSWVFLVALLRGVQCQAQLVESGGGVVQPGSSLRLSCAASGFRFSNYGMHWVRQAPGKGLEWVAVFSYDESDKYYAASVKGRFTISRDNSKNTLSLQMNSLRVEDTAVYYCAKDQKPWYSNSWFLTNFDSWGRGTLVTVSSASTKGPSVFPLAPSSKSTSGGTAALGCLVKDYFPEPVTVSWNSGALTSGVHTFPAVLQSSGLYSLSSVVTVPSSSLGTQTYICNVNHKPSNTKVDKKVEPKSCDKTHTCPPCPAPELLGGPSVFLFPPKPKDTLMISRTPEVTCVVVDVSHEDPEVKFNWYVDGVEVHNAKTKPREEQYNSTYRVVSVLTVLHQDWLNGKEYKCKVSNKALPAPIEKTISKAKGQPREPQVYTLPPSRDELTKNQVSLTCLVKGFYPSDIAVEWESNGQPENNYKTTPPVLDSDGSFFLYSKLTVDKSRWQQGNVFSCSVMHEALHNHYTQKSLSLSPELQLEESCAEAQDGELDGLWTTITIFITLFLLSVCYSATVTFFKVKWIFSSVVDLKQTIIPDYRNMIGQGA

SEQ ID NO: 69 - DNA, 1124 bp, Homo sapiens
tccgcaggcggaccgggggcaaaggaggtggcatgtcggtcaggcacagcagggtcctgtgtccgcgctgagccgcgctctccctgctccagcaaggaccatgagggcgctggaggggccaggcctgtcgctgctgtgcctggtgttggcgctgcctgccctgctgccggtgccggctgtacgcggagtggcagaaacacccacctacccctggcgggacgcagagacaggggagcggctggtgtgcgcccagtgccccccaggcacctttgtgcagcggccgtgccgccgagacagccccacgacgtgtggcccgtgtccaccgcgccactacacgcagttctggaactacctggagcgctgccgctactgcaacgtcctctgcggggagcgtgaggaggaggcacgggcttgccacgccacccacaaccgtgcctgccgctgccgcaccggcttcttcgcgcacgctggtttctgcttggagcacgcatcgtgtccacctggtgccggcgtgattgccccgggcacccccagccagaacacgcagtgccagccgtgccccccaggcaccttctcagccagcagctccagctcagagcagtgccagccccaccgcaactgcacggccctgggcctggccctcaatgtgccaggctcttcctcccatgacaccctgtgcaccagctgcactggcttccccctcagcaccagggtaccaggagctgaggagtgtgagcgtgccgtcatcgactttgtggctttccaggacatctccatcaagaggctgcagcggctgctgcaggccctcgaggccccggagggctggggtccgacaccaagggcgggccgcgcggccttgcagctgaagctgcgtcggcggctcacggagctcctgggggcgcaggacggggcgctgctggtgcggctgctgcaggcgctgcgcgtggccaggatgcccgggctggagcggagcgtccgtgagcgcttcctccctgtgcactgatcctggccccctcttatttattctacatccttggcaccccacttgcactgaaagaggcttttttttaaatagaagaaatgaggtttcttaaagcttatttttataaagctttttcataaaa

SEQ ID NO: 70 - protein, 300 aa, Homo sapiens
MRALEGPGLSLLCLVLALPALLPVPAVRGVAETPTYPWRDAETGERLVCAQCPPGTFVQRPCRRDSPTTCGPCPPRHYTQFWNYLERCRYCNVLCGEREEEARACHATHNRACRCRTGFFAHAGFCLEHASCPPGAGVIAPGTPSQNTQCQPCPPGTFSASSSSSEQCQPHRNCTALGLALNVPGSSSHDTLCTSCTGFPLSTRVPGAEECERAVIDFVAFQDISIKRLQRLLQALEAPEGWGPTPRAGRAALQLKLRRRLTELLGAQDGALLVRLLQALRVARMPGLERSVRERFLPVH

SEQ ID NO: 71 - DNA, 716 bp, Homo sapiens
aggctcagtataaatagcagccaccgctccctggcaggcagggacccgcagctcagctacagcacagatcaggtgaggagcacaccaaggagtgatttttaaaacttactctgttttctctttcccaacaagattatcatttcctttaaaaaaaatagttatcctggggcatacagccataccattctgaaggtgtcttatctcctctgatctagagagcaccatgaagcttctcacgggcctggttttctgctccttggtcctgggtgtcagcagccgaagcttcttttcgttccttggcgaggcttttgatggggctcgggacatgtggagagcctactctgacatgagagaagccaattacatcggctcagacaaatacttccatgctcgggggaactatgatgctgccaaaaggggacctgggggtgcctgggctgcagaagtgatcagcgatgccagagagaatatccagagattctttggccatggtgcggaggactcgctggctgatcaggctgccaatgaatggggcaggagtggcaaagaccccaatcacttccgacctgctggcctgcctgagaaatactgagcttcctcttcactctgctctcaggagatctggctgtgaggccctcagggcagggatacaaagcggggagagggtacacaatgggtatctaataaatacttaagaggtggaatttgtggaaact

SEQ ID NO: 72 - protein, 122 aa, Homo sapiens
MKLLTGLVFCSLVLGVSSRSFFSFLGEAFDGARDMWRAYSDMREANYIGSDKYFHARGNYDAAKRGPGGAWAAEVISDARENIQRFFGHGAEDSLADQAANEWGRSGKDPNHFRPAGLPEKY

SEQ ID NO: 73 - DNA, 1100 bp, Homo sapiens
ctaaagctgggttggtagctcctacctactgtgtggcaagaaggtatgggtcatgaacagaaccaaggagctgcgctgctacagatgttaccacttctgtggctgctaccccactcctgggccgtccctgaagctcctactccaatgtggccagatgacctgcaaaaccacacattcctgcacacagtgtactgccaggatgggagtcccagtgtgggactctctgaggcctacgacgaggaccagcttttcttcttcgacttttcccagaacactcgggtgcctcgcctgcccgaatttgctgactgggctcaggaacagggagatgctcctgccattttatttgacaaagagttctgcgagtggatgatccagcaaatagggccaaaacttgatgggaaaatcccggtgtccagagggtttcctatcgctgaagtgttcacgctgaagcccctggagtttggcaagcccaacactttggtctgttttgtcagtaatctcttcccacccatgctgacagtgaactggcagcatcattccgtccctgtggaaggatttgggcctacttttgtctcagctgtcgatggactcagcttccaggccttttcttacttaaacttcacaccagaaccttctgacattttctcctgcattgtgactcacgaaattgaccgctacacagcaattgcctattgggtaccccggaacgcactgccctcagatctgctggagaatgtgctgtgtggcgtggcctttggcctgggtgtgctgggcatcatcgtgggcattgttctcatcatctacttccggaagccttgctcaggtgactgattcttccagaccagagtttgatgccagcagcttcggccatccaaacagaggatgctcagatttctcacatcctgcccaggatctcctcttagggtagaagaagtctctgggacatccctggggtgtgtgtgtagatttcccacctggggactctgctgtccctgggcttgcatcccagggatcccagagtggcctgcctatcacaaccacatcccttccccccacaaggcaataaatctcatttctttaaaaaaaaaaaaaaaaaaaaa

SEQ ID NO: 74 - protein, 261 aa, Homo sapiens
MGHEQNQGAALLQMLPLLWLLPHSWAVPEAPTPMWPDDLQNHTFLHTVYCQDGSPSVGLSEAYDEDQLFFFDFSQNTRVPRLPEFADWAQEQGDAPAILFDKEFCEWMIQQIGPKLDGKIPVSRGFPIAEVFTLKPLEFGKPNTLVCFVSNLFPPMLTVNWQHHSVPVEGFGPTFVSAVDGLSFQAFSYLNFTPEPSDIFSCIVTHEIDRYTAIAYWVPRNALPSDLLENVLCGVAFGLGVLGIIVGIVLIIYFRKPCSGD

SEQ ID NO: 75 - DNA, 4927 bp, Homo sapiens
ggcaggtgcagctgccacagtgagacgggcaccccgacccgggcatggaggggggcaaggggcccaggctcagagacttcctgagtgggagtctggctacctgggcgctgggactggccgggctggtcggggaggcggaggactcggagggggaagaagaggaagaggaggaagagccgcccctttggttggagaagagattcctgcgcctcagcgatggggccctgctcctccgggtgctgggcatcattgcccccagctcccgagggggacctcggatgctcagaggccttgacggacctgctgcctggcgagtgtggaacctgaaccacctgtggggccgactgagggacttctaccaggaggagctgcagctgctgatcctgtcgccacccccagacctccagacattgggatttgaccctctctcagaagaagcggtggagcagctggaaggcgttcttcggctactgttgggagcgtcagtacagtgtgagcaccgggaactcttcatccgccacatccagggcctcagtctcgaggtccagagcgagctggccgctgccatccaggaggtgacccagccgggggccggcgtggtgctggcactgtctgggccagatcctggggagctggcacctgccgagctggagatgctgtcccggagcctgatggggacactgtcgaagctggcacgggagcgtgacctgggggcccagcggctggctgaactgctgctggagcgagaacccctctgcttgaggcctgaggctccctctagggctcccgccgagggcccctcgcaccatctggccctgcagctggccaacgccaaggctcagctgcggcgtctgcggcaggagctggaggagaaggccgagctgctgctagactcccaggccgaggtgcagggtttggaggccgaaataagaaggctccgccaggaggcccaggcgctgtcgggacaggccaagcgggccgagctgtaccgcgaggaggcagaggcgctgcgggagcgggccggccgcctgccccgcctgcaggaggagctgaggcgctgccgcgagcggctgcaggcggctgaggcctacaagagtcagctggaggaggagcgggtgctctcgggggtgctggaggcgtccaaggcgctgctggaagagcagctggaggctgcccgagagcgctgcgcccggctgcacgagacccagcgcgagaacctgctgctgcgaacccggctgggcgaggcccatgcggagctggactctctgcggcatcaggtggaccagctggctgaggagaatgtggagctggagctggagcttcagcggagcttggagccacctccaggatcccctggggaggcacccctagcaggagcggccccctcgctgcaagatgaggtgagggaggcagaggctgggcggcttcggacccttgagagggagaaccgggagcttcgggggctgcttcaggtgcttcaggggcagccagggggccagcaccccctgctggaggcaccgagagaggaccctgttcttccagtgctggaggaggctccccagactcctgtggccttcgaccacagccctcagggcttggttcagaaggcaagggatggaggcccccaggccttggacttggctcccccggcattagactcagtgctcgaggcatcagctgagtgtccccaggcacctgattcagacccacaggaggcagagagtccccttcaggcagctgccatggacccccaggcctcagactggtccccgcaagagtcaggctctcctgtggagacacaggagtccccggagaaggctggccgtagatcctctctccagagccctgcctctgtggccccacctcagggtccagggaccaaaattcaggccccgcagttgctgggaggagagacagagggaagagaggctccccaaggcgagttggtgcctgaggcctgggggttgagacaggagggccctgagcacaagccagggccttcggagcccagctctgtgcagctggaggagcaggagggcccaaaccagggcctggacctggccacgggacaagcagaggccagagagcatgaccagaggctggaagggacggtcagggacccagcctggcaaaaaccacagcagaagtcagaaggggctcttgaggtccaggtctgggaaggcccaatcccaggggagagcctggccagtggtgtcgcagagcaggaggccctcagggaggaggtggcacagttgaggagaaaggctgaggcccttggagatgagctggaagcccaggcccgcaagctggaggcccaaaacacggaggctgcccgcctctccaaggagctggcccaagcgcgaagggcagaggccgaggcccaccgggaggcagaggcccaggcctgggagcaagcccggctgcgggaggcagtggaggctgctggccaggagctggagtctgcgtcccaggaacgggaggcgctggtggaggcgctggcagcagcgggccgggagcggaggcagtgggagcgtgaggggtccaggctgcgggcccagtcggaggccgccgaggaacggatgcaggtgctggagagcgagggccgccagcacttggaggaggctgagagggagcgccgggagaaggaggccctccaggcggagctggagaaagctgtggtgcggggcaaggagttgggggcccggctggagcatttgcagcgtgagctggagcaggcggctctcgagcgccaggaatttctgcgagaaaaggaaagccagcaccagaggtaccagggcttggagcagcggctggaagctgagctgcaggcggcggcgaccagcaaggaggaggcgctgatggagctcaagaccagggccctgcagctggaagaggagctgttccagctgcgccagggccccgcggggctggggcccaaaaagcgtgcggagcctcagctggtggagacccagaatgtgcggcttattgaggtggagcgcagtaatgcgatgctggtggcagagaaggcagctttgcaggggcagctgcagcacctggaggggcagctggggagcctgcagggccgtgcccaggagctgctgctgcagagccagcgggcgcaggagcacagcagccgcctgcaggccgagaagtctgtgctggagattcagggccaggagctgcaccggaagctggaggtgctggaggaggaggtgcgggcggcacggcagtcccaggaggagacccgcgggcagcagcaggccctgcttcgggaccacaaggccctggcacagctgcagcggcggcaggaggccgagctagagggactgctggtgcggcaccgagacctcaaggccaacatgcgggcactggagctggcccaccgggagctgcagggccggcacgagcagctgcaggcccagcgggccagcgtggaggcacaggaggtggccctgctggcagagcgtgaacgcctgatgcaagatgggcatcggcagcggggcctggaggaggagctgcggaggcttcagagcgagcacgacagggctcagatgctgctggcagagttgtctcgggagcggggtgagctgcagggtgaacgcggggagctacggggccggctggcgcggctggagctggagcgggcacagctggagatgcagagccagcagctgcgcgagtccaaccagcagctggacctgagcgcctgccggctgaccacgcagtgtgagctattgacacagctgcgaagtgcccaggaagaggagaaccggcagctgctggctgaagttcaggccctgagccgggagaacagggagctcctggagcgcagcctggagagtcgggaccacctgcaccgcgaacagcgggagtacctggaccagcttaatgccctgcgccgcgagaagcagaagctcgtggagaagatcatggaccaataccgcgtgctggagcctgtgcccctgccccggaccaagaagggcagctggctggcagacaaggtgaagaggctgatgcggccccggcgggaggggggcccccctggggggctgcgcctgggggccgatggggctggcagcaccgagagcctggggggccccccggagacggagcttcctgagggcagggaggcagatgggacagggtccccttccccggcacccatgcgccgggcccagagctccctctgcctgcgggatgagaccttggcaggcgggcagcggcggaaactcagctcaaggttcccggtggggcgaagctctgagtcattcagccctggggacacccctaggcaacgattccgacagcgccatccaggccccctgggggcgcccgtctcccacagcaaaggacctggtgtgggatgggagaactccgctgagaccctgcaggaacacgaaacagatgccaaccgagagggccctgaggtacaggaaccggagaaacgtcccctcaccccatccctcagccagtgacaccgtgggaacagcaggcttgggagtgcagccttctcggcactggagtgtcagcggaggccccaggcagcccaagagctcagggagccagggaccccaaggggagtccttggacaaggaggcctgggccctgagatcctccacggtcagcgccggggcccggagatggagctgggacgagtgtgtggacaggggggatggctggcccccacgagcagctccaggctggagttctggttcttccaggtggctcccgctgaggcagcggtctctgggggatcccccagctgaaggaggctggcaggagttggcaagagaaccccctgccctgtccaggtgggaagctgagtcccagtgctgggggactgtggcctgggctgatcttgagccttaactggacatgaggggcatgagaataaagctgaactgcagcctcctgaaaaaaaaaaaaa

SEQ ID NO: 76 - protein, 1476 aa, Homo sapiens
MEGGKGPRLRDFLSGSLATWALGLAGLVGEAEDSEGEEEEEEEEPPLWLEKRFLRLSDGALLLRVLGIIAPSSRGGPRMLRGLDGPAAWRVWNLNHLWGRLRDFYQEELQLLILSPPPDLQTLGFDPLSEEAVEQLEGVLRLLLGASVQCEHRELFIRHIQGLSLEVQSELAAAIQEVTQPGAGVVLALSGPDPGELAPAELEMLSRSLMGTLSKLARERDLGAQRLAELLLEREPLCLRPEAPSRAPAEGPSHHLALQLANAKAQLRRLRQELEEKAELLLDSQAEVQGLEAEIRRLRQEAQALSGQAKRAELYREEAEALRERAGRLPRLQEELRRCRERLQAAEAYKSQLEEERVLSGVLEASKALLEEQLEAARERCARLHETQRENLLLRTRLGEAHAELDSLRHQVDQLAEENVELELELQRSLEPPPGSPGEAPLAGAAPSLQDEVREAEAGRLRTLERENRELRGLLQVLQGQPGGQHPLLEAPREDPVLPVLEEAPQTPVAFDHSPQGLVQKARDGGPQALDLAPPALDSVLEASAECPQAPDSDPQEAESPLQAAAMDPQASDWSPQESGSPVETQESPEKAGRRSSLQSPASVAPPQGPGTKIQAPQLLGGETEGREAPQGELVPEAWGLRQEGPEHKPGPSEPSSVQLEEQEGPNQGLDLATGQAEAREHDQRLEGTVRDPAWQKPQQKSEGALEVQVWEGPIPGESLASGVAEQEALREEVAQLRRKAEALGDELEAQARKLEAQNTEAARLSKELAQARRAEAEAHREAEAQAWEQARLREAVEAAGQELESASQEREALVEALAAAGRERRQWEREGSRLRAQSEAAEERMQVLESEGRQHLEEAERERREKEALQAELEKAVVRGKELGARLEHLQRELEQAALERQEFLREKESQHQRYQGLEQRLEAELQAAATSKEEALMELKTRALQLEEELFQLRQGPAGLGPKKRAEPQLVETQNVRLIEVERSNAMLVAEKAALQGQLQHLEGQLGSLQGRAQELLLQSQRAQEHSSRLQAEKSVLEIQGQELHRKLEVLEEEVRAARQSQEETRGQQQALLRDHKALAQLQRRQEAELEGLLVRHRDLKANMRALELAHRELQGRHEQLQAQRASVEAQEVALLAERERLMQDGHRQRGLEEELRRLQSEHDRAQMLLAELSRERGELQGERGELRGRLARLELERAQLEMQSQQLRESNQQLDLSACRLTTQCELLTQLRSAQEEENRQLLAEVQALSRENRELLERSLESRDHLHREQREYLDQLNALRREKQKLVEKIMDQYRVLEPVPLPRTKKGSWLADKVKRLMRPRREGGPPGGLRLGADGAGSTESLGGPPETELPEGREADGTGSPSPAPMRRAQSSLCLRDETLAGGQRRKLSSRFPVGRSSESFSPGDTPRQRFRQRHPGPLGAPVSHSKGPGVGWENSAETLQEHETDANREGPEVQEPEKRPLTPSLSQ

SEQ ID NO: 77 - DNA, 840 bp, Homo sapiens
actcgccacctcctcttccacccctgccaggcccagcagccaccacagcgcctgcttcctcggccctgaaatcatgcccctaggtctcctgtggctgggcctagccctgttgggggctctgcatgcccaggcccaggactccacctcagacctgatcccagccccacctctgagcaaggtccctctgcagcagaacttccaggacaaccaattccaggggaagtggtatgtggtaggcctggcagggaatgcaattctcagagaagacaaagacccgcaaaagatgtatgccaccatctatgagctgaaagaagacaagagctacaatgtcacctccgtcctgtttaggaaaaagaagtgtgactactggatcaggacttttgttccaggttgccagcccggcgagttcacgctgggcaacattaagagttaccctggattaacgagttacctcgtccgagtggtgagcaccaactacaaccagcatgctatggtgttcttcaagaaagtttctcaaaacagggagtacttcaagatcaccctctacgggagaaccaaggagctgacttcggaactaaaggagaacttcatccgcttctccaaatctctgggcctccctgaaaaccacatcgtcttccctgtcccaatcgaccagtgtatcgacggctgagtgcacaggtgccgccagctgccgcaccagcccgaacaccattgagggagctgggagaccctccccacagtgccacccatgcagctgctccccaggccaccccgctgatggagccccaccttgtctgctaaataaacatgtgccctcaggccaaaaaaaaaaaaaaaaaa

SEQ ID NO: 78 - protein, 198 aa, Homo sapiens
MPLGLLWLGLALLGALHAQAQDSTSDLIPAPPLSKVPLQQNFQDNQFQGKWYVVGLAGNAILREDKDPQKMYATIYELKEDKSYNVTSVLFRKKKCDYWIRTFVPGCQPGEFTLGNIKSYPGLTSYLVRVVSTNYNQHAMVFFKKVSQNREYFKITLYGRTKELTSELKENFIRFSKSLGLPENHIVFPVPIDQCIDG

SEQ ID NO: 79 - DNA, 2224 bp, Homo sapiens
gctgacacctgcccagtggaagctggcatccctccccttgtgggttcagagctgcaagaagcaccaggctcggccacttcagaagccccagcctcgacctagcccaccctctcagggccacagtgcagaagcctgcacacctgccaagtctctccgactccttgcagctgctgtcagcatggcccaggctcctgctgacccgggcagagaaggccaccttgaacaaagaatcctgcaggtgctgacagaggctggctccccggtgaaacttgcccagctggtgaaggaatgccaagcacccaagagggagctcaaccaagtcctctaccgaatgaaaaaggagttgaaagtctccctcacatcccctgccacctggtgcttgggcgggactgatcctgaaggcgagggtcctgcagagctggccttgtccagccctgccgagaggccccagcaacatgcagctacaattccagagacccctggccctcagttcagccaacaacgggaggaagacatctacaggtttctcaaagacaatggtccccagagggccctggtcatcgcccaagcactgggaatgaggacagcaaaagatgtgaaccgagacttgtacaggatgaagagcaggcaccttctggacatggatgagcagtccaaagcatggacgatttaccgcccagaagattctggaagaagagcaaagtcagcctcaattatttaccagcacaatccaatcaacatgatctgccagaatggacccaacagctggatttccattgcaaactccgaagccatccagattggacacgggaacatcattacaagacagacagtctccagggaggacggttccgccggtccacgccacctcccttcaatggcaccaggtgattcctcaacttgggggaccctagttgatccctgggggccccaggacatccacatggagcggtccatactgagacgggtgcagctgggacacagcaatgagatgaggctccacggcgtcccgtccgagggccctgcccacatcccccctggcagccccccagtctctgccactgctgccggcccagaagcttcgtttgaagcaagaattcccagtccaggaactcaccctgagggggaagccgcccagagaatccacatgaaatcgtgctttctcgaggacgccaccatcggcaacagcaacaaaatgtctatcagcccaggggtggctggcccaggaggagtcgcagggtctggagagggggagccaggggaggacgcaggtcgtcgtcccgcagacacacaatccagaagtcactttcctcgagacattggtcagcccatcactcccagccactcgaagctcacccccaagctggaaactatgactcttggaaacaggagtcacaaagctgcagaaggcagccactatgtggatgaagcctcacacgaggggagctggtggggaggtgggatttagtgcacagcctcacgtggggcttggacacaggctgggggtgggcgcatgctagggagactagcctgctgctctctgcattccttagcgtcttgtttgacctgcttgcttccagacataacctgcatgaatcagttttgggggaatggacctggcatggggatgggttcaggccaggtcttttgatggccaggagtagatgacagggagttgccttggggaacctttggtgtgccaagaggaggtgggtagatgggagtggggctcggtcccccaggcccaggggactctctccactctttcctgggctcggggcatctgcctggagttaccttccatcatggctacctgctgtggtttgaatgtttgagtcccaacaaaattcatatcaaaacataatcccaactgggtgcagtggctcacgcctgtaatcccagcactttgggaggccgaggcgggcggatcaataggtcaggaaatccagaccgtcctggctaacatggtgaaaccccgtctctactaaaaaaaaaaatacaaaaaattagccgggcgttgtggcgggcacctggagtcccagctactccggaggctgagggaggagaatggtgtgaacccgggaggtggagcttccagtgagccgagatcgcgccactgcactccaggctgggcgacagagcgagactccgtctcaaaaaaataaatacataaataaaaaataaaccacccataaaaaaaaaaaaaaaaaaaaaaaaaaaaaaa

SEQ ID NO: 80 - protein, 429 aa, Homo sapiens
MAQAPADPGREGHLEQRILQVLTEAGSPVKLAQLVKECQAPKRELNQVLYRMKKELKVSLTSPATWCLGGTDPEGEGPAELALSSPAERPQQHAATIPETPGPQFSQQREEDIYRFLKDNGPQRALVIAQALGMRTAKDVNRDLYRMKSRHLLDMDEQSKAWTIYRPEDSGRRAKSASIIYQHNPINMICQNGPNSWISIANSEAIQIGHGNIITRQTVSREDGSAGPRHLPSMAPGDSSTWGTLVDPWGPQDIHMERSILRRVQLGHSNEMRLHGVPSEGPAHIPPGSPPVSATAAGPEASFEARIPSPGTHPEGEAAQRIHMKSCFLEDATIGNSNKMSISPGVAGPGGVAGSGEGEPGEDAGRRPADTQSRSHFPRDIGQPITPSHSKLTPKLETMTLGNRSHKAAEGSHYVDEASHEGSWWGGGI

SEQ ID NO: 81 - DNA, 2425 bp, Homo sapiens
acgcggggattctgtgtaattcctatccacagtcacttctgttcatttttaatgaaaacctattgctgttattttctattatgagttaacggtgatgtgtgttttttaaattttgtatacttgctctcaccctaaaatataccttaagagacttttcccctgtttttctttctgctttccaagactccaggaaaaacagcttccatggcacattttgtacagggcacatctagaatgattgccgcagaaagttctacggagcataaagagtgtgctgaaccatcaacaagaaagaacttgatgaattctcttgaacaaaagataaggtgtttggaaaaacaaagaaaagagctcctggaagttaaccagcaatgggatcagcaatttagaagtatgaaagagttatatgaaagaaaggtagcagagctgaagacgaaactggacgccgcggaaagattcctcagcacgcgggagaaggatccgcatcagaggcagagaaaggacgacaggcagagagaggacgacaggcagcgcgacctgacccgggaccggctgcagcgggaggagaaggaaaaggaacgcctaaatgaagaattacatgaattgaaagaagagaataaacttttaaagggaaaaaatactcttgcgaacaaggaaaaggaacattacgaatgtgaaataaaacgcctcaataaggctcttcaggatgccttgaatatcaagtgttcattttccgaggactgtttgaggaagtctcgagtggaattctgccatgaggagatgagaacagaaatggaagttctgaagcagcaggtgcaaatatacgaagaagacttcaaaaaggaacgatcggatcgagagagacttaatcaagagaaagaggagctacagcaaattaatgaaacttcccaatcccagttgaacaggctgaattcccagataaaagcttgtcagatggagaaagaaaaactagaaaagcaattaaaacagatgtattgcccaccctgtaactgcggcttggttttccacctgcaagatccatgggtaccaacaggccctggagctgtgcagaagcaacgggagcacccaccagactgtcagtggtatgctcttgaccagcttccgccagatgtacaacacaaggcaaatggtttatcctcagtaaagaaagtccatccgtagaagtacacactaacagagagagacaacaggcaacgagggagcgtggctgaggaccctcttctttgtttatactgaggcttgtttctgccacaaaggcacatcatctaccctgttatttgtgcctggtcatgttttcctttggtatgaatacaggaaaaggcttctgacagctaagatcctgatcaaattggaggagccagttattatacaaccaaatacaacttccagtttccttgaaatgagacttggcagatggatgatgcacgactccctgaaaatctcttcagcatattgctgttggatgcacaaaaatgattctatgatttaggcaactcagtgtttgctgcagggatattgtatgttgatttaaagtgcatatgtgtgtgtgtgtgtgtgtgtgtgtgtgtgtttcctggggtaaaaatttctgcagttgtaaacgtttaacattgctcccattcttcttccacagggccttagttctttagctatttgactacatattgttgacctcagtgatcctaaacgtagaattgaagaggtgtatatacctcgttaaattaaataagtggttcaatctgaataagatggttaattggaagctattccttagacagatcatttctttaagatggtgagaaattgtgcgcctgcatcacaagacttgattatgaaagataaagtcttgggctgggtgcagtggctcatgcctataatcccagcactttgggaggctgaggcaggtggattgctttgaggccaggagttctagaccagcctggccagcatggtgaaaccccatctctactataaatacaaaaattagccaggctcgtggcacacacctataaacccagctactcaggaggcttgaggcgggaggatcacttgagcccagggaggcagaggttgctgtaagttgagatcgccactgcactccagcctgggaaatagagtgagcaagactcagtgccccctacccacccactccacaccaccaaaaaaaaaaaaaaaaaaaaaaggaagacaaagtcctgatgggatgatgatggctatatggctatgctgtgtccatatatacttacagaaatatttcagacatatggatttatagttaaatctgtgtttttccttcctatggatttgattaattttaatgaaaaacttaattctgactcctcaagccaattaaaatgaaaatggaatttatttaaaaaaaaaaaaaaaaaaaaaaaaaaaaaaa

SEQ ID NO: 82 - protein, 325 aa, Homo sapiens
MAHFVQGTSRMIAAESSTEHKECAEPSTRKNLMNSLEQKIRCLEKQRKELLEVNQQWDQQFRSMKELYERKVAELKTKLDAAERFLSTREKDPHQRQRKDDRQREDDRQRDLTRDRLQREEKEKERLNEELHELKEENKLLKGKNTLANKEKEHYECEIKRLNKALQDALNIKCSFSEDCLRKSRVEFCHEEMRTEMEVLKQQVQIYEEDFKKERSDRERLNQEKEELQQINETSQSQLNRLNSQIKACQMEKEKLEKQLKQMYCPPCNCGLVFHLQDPWVPTGPGAVQKQREHPPDCQWYALDQLPPDVQHKANGLSSVKKVHP

SEQ ID NO: 83 - DNA, 2737 bp, Homo sapiens
agtgcctcaccaccacctgcccgcgcgccgccccatataaaggcgccgccgtccttacccccaggactcggccccatggagacgccgccggccgccgctggcgcatggcgggtaggagctgtggcgcggggccttccaggagtctgagctatgagtggcccctgtggagagaagcctgtcctggaagccagccccaccatgagtctgtgggaatttgaggacagccacagccgtcagggcaccccaaggccgggtcaagagctggccgctgaggaggcctcggccctggaactgcagatgaaggtggacttcttccggaagctgggctattcatccacggagatccacagcgtcctgcagaagctgggcgtccaggcagacaccaacacggtgctgggtgagctggtgaaacacgggacagccaccgagcgggagcgccagacctcaccggacccctgccctcagctccctctagtcccgcggggtggtggcacccctaaggctcccaacctggagcctccactcccagaagaggaaaaggagggcagcgacctgagaccagtggtcatcgatgggagcaacgtggccatgagccatgggaacaaggaggtcttctcctgccggggcatcctgctggcagtgaactggtttctggagcggggccacacagacatcacagtgtttgtgccatcctggaggaaggagcagcctcggcccgacgtgcccatcacagaccagcacatcctgcgggaactggagaagaagaagatcctggtgttcacaccatcacgacgcgtgggtggcaagcgggtggtgtgctatgacgacagattcattgtgaagctggcctacgagtctgacgggatcgtggtttccaacgacacataccgtgacctccaaggcgagcggcaggagtggaagcgcttcatcgaggagcggctgctcatgtactccttcgtcaatgacaagtttatgccccctgatgacccactgggccggcacgggcccagcctggacaacttcctgcgtaagaagccactcactttggagcacaggaagcagccgtgtccctatggaaggaaatgcacctatgggatcaagtgccgattcttccacccagagcggccaagctgcccccagcgctctgtggcagatgagctccgtgccaatgctctcctctcaccccccagagccccaagcaaggacaaaaatggccggcggccttcaccttcatcccagtccagctctctgctaacagagagtgagcagtgcagcctggatgggaagaagctgggggcccaggcatccccagggtcccgccaagagggtctaacacagacctatgccccatcaggcaggagcctcgcacctagcgggggcagtggcagcagctttgggcccacagactggctcccacagacgctggactcactcccgtacgtctcccaggattgcctggactcgggcattggctccctggagagccagatgtcggaactttggggggttcgaggaggaggccctggtgagccgggcccaccccgagccccttacacgggctacagtccctatggatctgagctcccagccaccgcagccttctctgcctttggccgggccatgggtgctggccacttcagtgtccctgccgactacccacccgcgccccctgcctttccacctcgagagtactggtctgaaccatacccactgcccccacccacatcagtccttcaggagcccccagtgcagagcccaggggctggcaggagcccgtggggcagggcaggcagcctggccaaggagcaggccagcgtgtatactaagctgtgtggtgtgtttcccccgcacctggtggaggctgtgatggggcgcttcccacagctcctggacccccagcagctggctgccgagatcctctcctacaagtcccagcaccccagtgagtaagctgcctgtggctggcaagggcagcacccccagcctccaagggccgtcaggctgggctttgggccattgagcagcccattcccagccctgaggcccaccccagaggctggacagagggaggattcaagtcgggaaggaaacccacaaaccaaagatactgtaggattggttctggcccatgcagcacctctagctgtctgcctcagtgggtcagaagcgatcaccctgttgatacacattgtatctctgtagtttaaggagacgctgccggtaacggcgtcggtccgtggctgaggcccaaaccgtcttttctctcagagggtggggagggaggtgggggcagcagaggcctgggctgggtgccctgtgcacgccaccccacttccgccctacccctgggacgttggccttggctggctagttgggcaccgtgtgcctgccctccaagggcctcctctacgccaatgaggcctcatctgtgctctcgctgggcacgtggcttcatgtcagtaagcaagatgcttcttaataacccaccttctgccccactctattccttatcctgctgcccctgtaggggtcaagggccctccgtctacaccctcttcttctcctccatcctttattcagagtcatctcgcccttccccatgggtgggggaacctgtgtttgtttgtgtgcacatgtaaattttaaatattttaagcagaaagtccttacctcctgtaacacatcaataaagtacaatcattgtgagccctttcaaaaaaaaaaaaaaaaaaaaaaa

SEQ ID NO: 84 - protein, 599 aa, Homo sapiens
MSGPCGEKPVLEASPTMSLWEFEDSHSRQGTPRPGQELAAEEASALELQMKVDFFRKLGYSSTEIHSVLQKLGVQADTNTVLGELVKHGTATERERQTSPDPCPQLPLVPRGGGTPKAPNLEPPLPEEEKEGSDLRPVVIDGSNVAMSHGNKEVFSCRGILLAVNWFLERGHTDITVFVPSWRKEQPRPDVPITDQHILRELEKKKILVFTPSRRVGGKRVVCYDDRFIVKLAYESDGIVVSNDTYRDLQGERQEWKRFIEERLLMYSFVNDKFMPPDDPLGRHGPSLDNFLRKKPLTLEHRKQPCPYGRKCTYGIKCRFFHPERPSCPQRSVADELRANALLSPPRAPSKDKNGRRPSPSSQSSSLLTESEQCSLDGKKLGAQASPGSRQEGLTQTYAPSGRSLAPSGGSGSSFGPTDWLPQTLDSLPYVSQDCLDSGIGSLESQMSELWGVRGGGPGEPGPPRAPYTGYSPYGSELPATAAFSAFGRAMGAGHFSVPADYPPAPPAFPPREYWSEPYPLPPPTSVLQEPPVQSPGAGRSPWGRAGSLAKEQASVYTKLCGVFPPHLVEAVMGRFPQLLDPQQLAAEILSYKSQHPSE

SEQ ID NO: 85 - DNA, 1867 bp, Homo sapiens
cacatagctcagttcccataaaagggctggtttgccgcgtcggggagtggagtgggacaggtatataaaggaagtacagggcctggggaagaggccctgtctaggtagctggcaccaggagccgtgggcaagggaagaggccacaccctgccctgctctgctgcagccagaatgggtgtgaaggcgtctcaaacaggctttgtggtcctggtgctgctccagtgctgctctgcatacaaactggtctgctactacaccagctggtcccagtaccgggaaggcgatgggagctgcttcccagatgcccttgaccgcttcctctgtacccacatcatctacagctttgccaatataagcaacgatcacatcgacacctgggagtggaatgatgtgacgctctacggcatgctcaacacactcaagaacaggaaccccaacctgaagactctcttgtctgtcggaggatggaactttgggtctcaaagattttccaagatagcctccaacacccagagtcgccggactttcatcaagtcagtaccgccatttctgcgcacccatggctttgatgggctggaccttgcctggctctaccctggacggagagacaaacagcattttaccaccctaatcaaggaaatgaaggccgaatttataaaggaagcccagccagggaaaaagcagctcctgctcagcgcagcactgtctgcggggaaggtcaccattgacagcagctatgacattgccaagatatcccaacacctggatttcattagcatcatgacctacgattttcatggagcctggcgtgggaccacaggccatcacagtcccctgttccgaggtcaggaggatgcaagtcctgacagattcagcaacactgactatgctgtggggtacatgttgaggctgggggctcctgccagtaagctggtgatgggcatccccaccttcgggaggagcttcactctggcttcttctgagactggtgttggagccccaatctcaggaccgggaattccaggccggttcaccaaggaggcagggacccttgcctactatgagatctgtgacttcctccgcggagccacagtccatagaatcctcggccagcaggtcccctatgccaccaagggcaaccagtgggtaggatacgacgaccaggaaagcgtcaaaagcaaggtgcagtacctgaaggacaggcagctggcgggcgccatggtatgggccctggacctggatgacttccagggctccttctgcggccaggatctgcgcttccctctcaccaatgccatcaaggatgcactcgctgcaacgtagccctctgttctgcacacagcacgggggccaaggatgccccgtccccctctggctccagctggccgggagcctgatcacctgccctgctgagtcccaggctgagcctcagtctccctcccttggggcctatgcagaggtccacaacacacagatttgagctcagccctggtgggcagagaggtagggatggggctgtggggatagtgaggcatcgcaatgtaagactcgggattagtacacacttgttgattaatggaaatgtttacagatccccaagcctggcaagggaatttcttcaactccctgccccccagccctccttatcaaaggacaccattttggcaagctctatcaccaaggagccaaacatcctacaagacacagtgaccatactaattataccccctgcaaagcccagcttgaaaccttcacttaggaacgtaatcgtgtcccctatcctacttccccttcctaattccacagctgctcaataaagtacaagagcttaacagtgaaaaaaaaaaaaaaaaaaaaaaaaaaaaaa

SEQ ID NO: 86 - protein, 383 aa, Homo sapiens
MGVKASQTGFVVLVLLQCCSAYKLVCYYTSWSQYREGDGSCFPDALDRFLCTHIIYSFANISNDHIDTWEWNDVTLYGMLNTLKNRNPNLKTLLSVGGWNFGSQRFSKIASNTQSRRTFIKSVPPFLRTHGFDGLDLAWLYPGRRDKQHFTTLIKEMKAEFIKEAQPGKKQLLLSAALSAGKVTIDSSYDIAKISQHLDFISIMTYDFHGAWRGTTGHHSPLFRGQEDASPDRFSNTDYAVGYMLRLGAPASKLVMGIPTFGRSFTLASSETGVGAPISGPGIPGRFTKEAGTLAYYEICDFLRGATVHRILGQQVPYATKGNQWVGYDDQESVKSKVQYLKDRQLAGAMVWALDLDDFQGSFCGQDLRFPLTNAIKDALAAT

SEQ ID NO: 87 - DNA, 2406 bp, Homo sapiens
gattctgtgtgtgtcctcagatgctcagccacagacctttgagggagtaaagggggcagacccacccaccttgcctccaggctctttccttcctggtcctgttctatggtggggctcccttgccagacttcagactgagaagtcagatgaagtttcaagaaaaggaaattggtgggtgacagagatgggtggaggggctggggaaaggctgtttacttcctcctgtctagtcggtttggtccctttagggctccggatatctttggtgacttgtccactccagtgtggcatcatgtggcagctgctcctcccaactgctctgctacttctagtttcagctggcatgcggactgaagatctcccaaaggctgtggtgttcctggagcctcaatggtacagggtgctcgagaaggacagtgtgactctgaagtgccagggagcctactcccctgaggacaattccacacagtggtttcacaatgagagcctcatctcaagccaggcctcgagctacttcattgacgctgccacagtcgacgacagtggagagtacaggtgccagacaaacctctccaccctcagtgacccggtgcagctagaagtccatatcggctggctgttgctccaggcccctcggtgggtgttcaaggaggaagaccctattcacctgaggtgtcacagctggaagaacactgctctgcataaggtcacatatttacagaatggcaaaggcaggaagtattttcatcataattctgacttctacattccaaaagccacactcaaagacagcggctcctacttctgcagggggctttttgggagtaaaaatgtgtcttcagagactgtgaacatcaccatcactcaaggtttggcagtgtcaaccatctcatcattctttccacctgggtaccaagtctctttctgcttggtgatggtactcctttttgcagtggacacaggactatatttctctgtgaagacaaacattcgaagctcaacaagagactggaaggaccataaatttaaatggagaaaggaccctcaagacaaatgacccccatcccatgggggtaataagagcagtagcagcagcatctctgaacatttctctggatttgcaaccccatcatcctcaggcctctctacaagcagcaggaaacatagaactcagagccagatcccttatccaactctcgacttttccttggtctccagtggaagggaaaagcccatgatcttcaagcagggaagccccagtgagtagctgcattcctagaaattgaagtttcagagctacacaaacactttttctgtcccaaccgttccctcacagcaaagcaacaatacaggctagggatggtaatcctttaaacatacaaaaattgctcgtgttataaattacccagtttagaggggaaaaaaaaacaattattcctaaataaatggataagtagaattaatggttgaggcaggaccatacagagtgtgggaactgctggggatctagggaattcagtgggaccaatgaaagcatggctgagaaatagcaggtagtccaggatagtctaagggaggtgttcccatctgagcccagagataagggtgtcttcctagaacattagccgtagtggaattaacaggaaatcatgagggtgacgtagaattgagtcttccaggggactctatcagaactggaccatctccaagtatataacgatgagtcctcttaatgctaggagtagaaaatggtcctaggaaggggactgaggattgcggtggggggtggggtggaaaagaaagtacagaacaaaccctgtgtcactgtcccaagttgctaagtgaacagaactatctcagcatcagaatgagaaagcctgagaagaaagaaccaaccacaagcacacaggaaggaaagcgcaggaggtgaaaatgctttcttggccagggtagtaagaattagaggttaatgcagggactgtaaaaccaccttttctgcttcaatatctaattcctgtgtagctttgttcattgcatttattaaacaaatgttgtataaccaatactaaatgtactactgagcttcgctgagttaagttatgaaactttcaaatccttcatcatgtcagttccaatgaggtggggatggagaagacaattgttgcttatgaaagaaagctttagctgtctctgttttgtaagctttaagcgcaacatttcttggttccaataaagcattttacaagatcttgcatgctactcttagatagaagatgggaaaaccatggtaataaaatatgaatgataaaaaaaaaaaaaaaaaaaaaaaaaaaaaaaaaaaaaaaaaaaaaaaaaaaaaaaaaaaaaaaaaaaaaaaaaaaaaaaaaaaaaaaaaaaaaaaaaaaa

SEQ ID NO: 88 - protein, 290 aa, Homo sapiens
MGGGAGERLFTSSCLVGLVPLGLRISLVTCPLQCGIMWQLLLPTALLLLVSAGMRTEDLPKAVVFLEPQWYRVLEKDSVTLKCQGAYSPEDNSTQWFHNESLISSQASSYFIDAATVDDSGEYRCQTNLSTLSDPVQLEVHIGWLLLQAPRWVFKEEDPIHLRCHSWKNTALHKVTYLQNGKGRKYFHHNSDFYIPKATLKDSGSYFCRGLFGSKNVSSETVNITITQGLAVSTISSFFPPGYQVSFCLVMVLLFAVDTGLYFSVKTNIRSSTRDWKDHKFKWRKDPQDK

SEQ ID NO: 89 - DNA, 7133 bp, Homo sapiens
aaagtcagagtactgggagaacagaagacttcacaatttaatgcctcagtttttaaaaaaggatccttacacttcatgtctcctagccatcagaagaggaatgagacagcaaaagttcaaatggcctgtttcaagtttctgatataaaacgatgacattttcaggaaaatcctgcatttccagagagagactggctggttaaatttctgaaagaggacaccagctaaaagaaggtattgcatctcacccgagcagactgtgtctgtggaaagtgtaagccccttgccagaagagcagcttcccagcaaaggcagagggtgaaaacagcaaaggtcttaagacactggggacctagagtcaaaagggacctcctccagggaaaacgctgtgtgagaaatggcctcattcggtgactgtgagtgacacagcagaaagttgggtcattccggctgcttttttgagaagtccctgaagagatcaataacagcaagagggaacctggcaaggaagctattcctataatccaggaaagagatgaggaaggcttggaccaggtggtagtggtgtcaggtagtcaaatgctgggtatattttgaagatacaccccataggatttgctccacattgaatgtggaatgctggaagagagataaagtgtacctgtcacatactttttgagttttatttattttcttagaagtaagtacacaaagagatgctacctaggagaagggtattcttttcactattctttcaaattttctgtatgttcgaacattttcatagtagaaagttggggggaaaatctgtttcataaacatttcctcagcagcagtccagtctattgcattttaattggttgtgatatcattgttttatgcaatacgttctcaacaagtatatcctccggcaaactgaacaaggaccaagtctgttctgcctacagctctgcttcctcatagctgctttccagaacgtgactcttgcaaattatcaagaaaggggaactaatctaagggatccagatcaaacagcctcatgaagacttattttatgtttctaatataaagatagaagttttcagaaaagccctgctacacagaggatcagagcaggggtgggcctgctgggctgcagctgggattctgagcatcctttcccggaggcacggaaagtgagtgagtgagcccagtgaggaagaagttgaagctttgatatgagtaaacaagtatctctacctgaaatgattaaagactggaccaaagagcatgtgaaaaaatgggtaaatgaagaccttaagattaatgagcaatacgggcaaattctgctcagtgaagaagtaacaggattagtcctgcaggaattaactgagaaggaccttgtagaaatggggctaccatggggtccagcacttttgataaaacgttcatacaacaaattgaatagtaagtcccctgaaagtgacaatcatgatccgggacaattagataattcaaaaccgtccaaaacagaacaccagaaaaatccaaaacacaccaaaaaggaagaagaaaattcaatgtcatctaatattgattatgatcccagagagatcagagatatcaaacaagaagaatcaattcttatgaaagaaaatgtgttagatgaagtagcaaatgctaaacacaagaaaaagggtaagctaaaacctgaacaattgacttgtatgccatatccttttgatcagttccatgacagccatcgctacatagaacattatactctacaacctgaaacaggagcactcaatctcattgatccaatacatgagttcaaagctctcacaaacacagaaacagccacggaagtggacattaagatgaaattcagcaatgaagtcttccgatttgcatcagcttgtatgaattcacgcaccaatggcaccatccattttggagtcaaggacaaaccccatggagaaattgttggtgtgaaaatcaccagtaaggctgccttcattgaccacttcaatgtaatgatcaaaaagtattttgaagaaagtgagatcaatgaagccaagaagtgtattcgggagccaaggtttgtggaagtccttctgcagaacaatacaccatctgacagatttgtcattgaagttgatactattccaaaacactctatatgtaatgataagtatttctacattcagatgcaaatttgtaaagataaaatatggaaacaaaaccaaaatctttcactgtttgtaagagaaggggctagctctagggatatcctggccaattccaagcaacgggatgtagatttcaaggcatttttacaaaatttaaagtcactggtagcatctagaaaagaggctgaagaagagtatggaatgaaggcaatgaagaaggagagtgaaggactaaagctggttaaacttctcataggaaaccgagactcactggataattcatactatgactggtacattcttgtaacaaataaatgccatccaaaccaaataaagcacttagattttttaaaagaaattaaatggtttgctgtgttggagtttgatcctgaatctatgatcaatggagtggtcaaagcttacaaagaaagtcgggtggcaaaccttcactttccaaatcaatatgaagacaagacaactaacatgtgggagaagatttctactcttaatctttaccaacagcccagctggattttctgcaacggcagatcagacctgaaaagcgagacatataaacctctagaaccacatttatggcagagagaaagagcttcagaagtcaggaaactaattttatttctcacagatgaaaatataatgacaagaggaaaatttttggtagtgtttctattactctcttcagtggaaagcccaggagatccactcattgaaactttctgggctttctatcaagctctcaaaggaatggaaaatatgttgtgtatctctgtaaactcacatatttatcaacgatggaaagatctactacaaacaagaatgaagatggaagatgaactaacaaaccacagtatttccactttaaatatagaactggtaaacagcactatccttaaactaaaatcggtgactcggtcatcaagaaggtttttgcccgcccgtggatcttcttcagttatcctagagaaaaagaaagaggatgtcttgactgcactggaaatcctctgtgaaaatgagtgtacagagacagacatcgagaaagacaaatctaaattcctggagtttaagaaatcaaaagaagaacacttttatcgaggtggcaaagtatcctggtggaacttctatttttcttctgaaaactattcttcagattttgttaaaagggacagttatgaaaagcttaaagatttaatacactgctgggcagagtctcctaaaccaatatttgcaaaaatcatcaatctttatcatcatccaggctgtggaggtaccacactggctatgcatgttctctgggacttaaagaaaaacttcagatgtgctgtgttaaaaaacaagacaactgattttgcagaaattgcagagcaagtgatcaatctggtcacctatagggcaaagagccatcaggattacattcctgtgcttctccttgtggatgattttgaagaacaagaaaatgtctactttctacaaaatgccatccattccgttttagcagaaaaggatttgcgatatgaaaaaacattggtaattatcttaaactgcatgagatcccggaatccagatgaaagtgcaaaattggcagacagtattgcactaaattaccaactttcttccaaggaacaaagagcttttggtgccaaactgaaggaaattgaaaagcagcacaagaactgtgaaaacttttattccttcatgatcatgaaaagcaattttgatgaaacatatatagaaaatgtagtcaggaatatcctaaaaggacaggatgttgacagcaaggaagcacaactcatttccttcctggctttactcagctcttatgttactgactctacaatttcagtttcacagtgtgaaatatttttgggaatcatatacactagtacaccctgggaacctgaaagcttagaagacaagatgggaacttattctacacttctaataaaaacagaagttgcagaatatgggagatacacaggtgtgcgtatcattcaccctctgattgccctgtactgtctaaaagaactggaaagaagctatcacttggataaatgtcaaattgcattgaatatattagaagagaatttattctatgattctggaataggaagagacaaatttcaacatgatgttcaaactcttctgcttacaagacagcgcaaggtgtatggagatgaaacagacactctgttttccccattaatggaagctttacagaataaagacattgaaaaggtcttgagtgcaggaagtagacgattcccacaaaatgcattcatttgtcaagccttagcaagacatttctacattaaagagaaggactttaacacagctctggactgggcacgtcaggccaaaatgaaagcacctaaaaattcctatatttcagatacactaggtcaagtctacaaaagtgaaatcaaatggtggttggatgggaacaaaaactgtaggagcattactgttaatgacctaacacatctcctagaagctgcggaaaaagcctcaagagctttcaaagaatcccaaaggcaaactgatagtaaaaactatgaaaccgagaactggtcaccacagaagtcccagagacgatatgacatgtataacacagcttgtttcttgggtgaaatagaagttggtctttacactatccagattcttcagctcactccctttttccacaaagaaaatgaattatccaaaaaacatatggtgcaatttttatcaggaaagtggaccattcctcctgatcccagaaatgaatgttatttggctcttagcaagttcacatcccacctaaaaaatttacaatcagatctgaaaaggtgctttgacttttttattgattatatggttcttctgaaaatgaggtatacccaaaaagaaattgcagaaatcatgttaagcaagaaagtcagtcgttgtttcaggaaatacacagaacttttctgtcatttggatccatgtctattacaaagtaaagagagtcaattactccaggaggagaattgcaggaaaaagctagaagctctgagagcagataggtttgctggactcttggaatatcttaatccaaactacaaagatgctaccaccatggaaagtatagtgaatgaatatgccttcctactgcagcaaaactcaaaaaagcccatgacaaatgagaaacaaaattccattttggccaacattattctgagttgtctaaagcccaactccaagttaattcaaccacttaccacgctaaaaaaacaactccgagaggtcttgcaatttgtaggactaagtcatcaatatccaggtccttatttcttggcctgcctcctgttctggccagaaaatcaagagctagatcaagattccaaactaatagaaaagtatgtttcatccttaaatagatccttcaggggacagtacaagcgcatgtgcaggtccaagcaggcaagcacacttttctatctgggcaaaaggaagggtctaaacagtattgttcacaaggccaaaatagagcagtactttgataaagcacaaaatacaaattccctctggcacagtggggatgtgtggaaaaaaaatgaagtcaaagacctcctgcgtcgtctaactggtcaggctgaaggcaagctaatctctgtagaatatggaacagaggaaaaaataaaaataccagtaatatctgtttattcaggtccactcagaagtggtaggaacatagaaagagtgtctttctacctaggattttccattgaaggccctctggcatatgatatagaagtaatttaagacaatacatcacctgtagttcaaatacgtttatttatatctttatgattttattctctctctctattctcatggcactttcataacattatggctaacctctaattacagattttgcttttgcctccctgaatgaattacaagcctttttaagatatgaaatatgcctacccgcagagcttggcacaaagtggagtcaatcttttaatgttttaaatatgcattttcagactcaaataattaagaagtttcattgatatccactggtcacatcataactgtctatagggcaataaaatctgtgttaaactcaattgcttttataagttttctaaattatttcttcactgtgacagcaaagatttaaataagatgaatgtaaaagagaaagcttattggactcaaacccacagatccacaccagagttctatttacctcatcttggtatcaataaaaacttatgtggaaggtaaatatattgttccccatccaccacataacactctccccaacacacacacacacacacacacacacacacacacacacacacactccttgtaccccttgcccttctcccagctcattgctccaggagagagaagagttcaaaaaataaagtaatcataaacttgaactctctccattctcttgttcccatttacaggtgaatctcttcctttaagccatttttgtctcctgtgaatacagccttatctccacctgtttcttagatcccatctcccctggcttattttttccattcattaccctctttgttccctttacttctcaacctgtgctatatacatgctgttctctctgttgagattgccttatttccatctaacattctctctcctgctattctgatttgtcattcacaactgatttcaagagtcaccttcaccaggaagtcttccttgaccaccatcattcctgcctgattagagggcttcctcatggtaatatgtgttctcaagttttcagtgtcaaggaatgccatcccagaagctcattctcagatgcacaacagccagaacagtctcaagcagcattctagagcttggaatttaagaactacgcattgcctataaagtgaaacataggctaatatagattaaattgaatattgaataaaaaatatatttatttatccac

SEQ ID NO: 90 - protein, 1584 aa, Homo sapiens
MSKQVSLPEMIKDWTKEHVKKWVNEDLKINEQYGQILLSEEVTGLVLQELTEKDLVEMGLPWGPALLIKRSYNKLNSKSPESDNHDPGQLDNSKPSKTEHQKNPKHTKKEEENSMSSNIDYDPREIRDIKQEESILMKENVLDEVANAKHKKKGKLKPEQLTCMPYPFDQFHDSHRYIEHYTLQPETGALNLIDPIHEFKALTNTETATEVDIKMKFSNEVFRFASACMNSRTNGTIHFGVKDKPHGEIVGVKITSKAAFIDHFNVMIKKYFEESEINEAKKCIREPRFVEVLLQNNTPSDRFVIEVDTIPKHSICNDKYFYIQMQICKDKIWKQNQNLSLFVREGASSRDILANSKQRDVDFKAFLQNLKSLVASRKEAEEEYGMKAMKKESEGLKLVKLLIGNRDSLDNSYYDWYILVTNKCHPNQIKHLDFLKEIKWFAVLEFDPESMINGVVKAYKESRVANLHFPNQYEDKTTNMWEKISTLNLYQQPSWIFCNGRSDLKSETYKPLEPHLWQRERASEVRKLILFLTDENIMTRGKFLVVFLLLSSVESPGDPLIETFWAFYQALKGMENMLCISVNSHIYQRWKDLLQTRMKMEDELTNHSISTLNIELVNSTILKLKSVTRSSRRFLPARGSSSVILEKKKEDVLTALEILCENECTETDIEKDKSKFLEFKKSKEEHFYRGGKVSWWNFYFSSENYSSDFVKRDSYEKLKDLIHCWAESPKPIFAKIINLYHHPGCGGTTLAMHVLWDLKKNFRCAVLKNKTTDFAEIAEQVINLVTYRAKSHQDYIPVLLLVDDFEEQENVYFLQNAIHSVLAEKDLRYEKTLVIILNCMRSRNPDESAKLADSIALNYQLSSKEQRAFGAKLKEIEKQHKNCENFYSFMIMKSNFDETYIENVVRNILKGQDVDSKEAQLISFLALLSSYVTDSTISVSQCEIFLGIIYTSTPWEPESLEDKMGTYSTLLIKTEVAEYGRYTGVRIIHPLIALYCLKELERSYHLDKCQIALNILEENLFYDSGIGRDKFQHDVQTLLLTRQRKVYGDETDTLFSPLMEALQNKDIEKVLSAGSRRFPQNAFICQALARHFYIKEKDFNTALDWARQAKMKAPKNSYISDTLGQVYKSEIKWWLDGNKNCRSITVNDLTHLLEAAEKASRAFKESQRQTDSKNYETENWSPQKSQRRYDMYNTACFLGEIEVGLYTIQILQLTPFFHKENELSKKHMVQFLSGKWTIPPDPRNECYLALSKFTSHLKNLQSDLKRCFDFFIDYMVLLKMRYTQKEIAEIMLSKKVSRCFRKYTELFCHLDPCLLQSKESQLLQEENCRKKLEALRADRFAGLLEYLNPNYKDATTMESIVNEYAFLLQQNSKKPMTNEKQNSILANIILSCLKPNSKLIQPLTTLKKQLREVLQFVGLSHQYPGPYFLACLLFWPENQELDQDSKLIEKYVSSLNRSFRGQYKRMCRSKQASTLFYLGKRKGLNSIVHKAKIEQYFDKAQNTNSLWHSGDVWKKNEVKDLLRRLTGQAEGKLISVEYGTEEKIKIPVISVYSGPLRSGRNIERVSFYLGFSIEGPLAYDIEVI

SEQ ID NO: 91 - DNA, 2387 bp, Homo sapiens
agacacctctgccctcaccatgagcctctggcagcccctggtcctggtgctcctggtgctgggctgctgctttgctgcccccagacagcgccagtccacccttgtgctcttccctggagacctgagaaccaatctcaccgacaggcagctggcagaggaatacctgtaccgctatggttacactcgggtggcagagatgcgtggagagtcgaaatctctggggcctgcgctgctgcttctccagaagcaactgtccctgcccgagaccggtgagctggatagcgccacgctgaaggccatgcgaaccccacggtgcggggtcccagacctgggcagattccaaacctttgagggcgacctcaagtggcaccaccacaacatcacctattggatccaaaactactcggaagacttgccgcgggcggtgattgacgacgcctttgcccgcgccttcgcactgtggagcgcggtgacgccgctcaccttcactcgcgtgtacagccgggacgcagacatcgtcatccagtttggtgtcgcggagcacggagacgggtatcccttcgacgggaaggacgggctcctggcacacgcctttcctcctggccccggcattcagggagacgcccatttcgacgatgacgagttgtggtccctgggcaagggcgtcgtggttccaactcggtttggaaacgcagatggcgcggcctgccacttccccttcatcttcgagggccgctcctactctgcctgcaccaccgacggtcgctccgacggcttgccctggtgcagtaccacggccaactacgacaccgacgaccggtttggcttctgccccagcgagagactctacacccaggacggcaatgctgatgggaaaccctgccagtttccattcatcttccaaggccaatcctactccgcctgcaccacggacggtcgctccgacggctaccgctggtgcgccaccaccgccaactacgaccgggacaagctcttcggcttctgcccgacccgagctgactcgacggtgatggggggcaactcggcgggggagctgtgcgtcttccccttcactttcctgggtaaggagtactcgacctgtaccagcgagggccgcggagatgggcgcctctggtgcgctaccacctcgaactttgacagcgacaagaagtggggcttctgcccggaccaaggatacagtttgttcctcgtggcggcgcatgagttcggccacgcgctgggcttagatcattcctcagtgccggaggcgctcatgtaccctatgtaccgcttcactgaggggccccccttgcataaggacgacgtgaatggcatccggcacctctatggtcctcgccctgaacctgagccacggcctccaaccaccaccacaccgcagcccacggctcccccgacggtctgccccaccggaccccccactgtccacccctcagagcgccccacagctggccccacaggtcccccctcagctggccccacaggtccccccactgctggcccttctacggccactactgtgcctttgagtccggtggacgatgcctgcaacgtgaacatcttcgacgccatcgcggagattgggaaccagctgtatttgttcaaggatgggaagtactggcgattctctgagggcagggggagccggccgcagggccccttccttatcgccgacaagtggcccgcgctgccccgcaagctggactcggtctttgaggagcggctctccaagaagcttttcttcttctctgggcgccaggtgtgggtgtacacaggcgcgtcggtgctgggcccgaggcgtctggacaagctgggcctgggagccgacgtggcccaggtgaccggggccctccggagtggcagggggaagatgctgctgttcagcgggcggcgcctctggaggttcgacgtgaaggcgcagatggtggatccccggagcgccagcgaggtggaccggatgttccccggggtgcctttggacacgcacgacgtcttccagtaccgagagaaagcctatttctgccaggaccgcttctactggcgcgtgagttcccggagtgagttgaaccaggtggaccaagtgggctacgtgacctatgacatcctgcagtgccctgaggactagggctcccgtcctgctttggcagtgccatgtaaatccccactgggaccaaccctggggaaggagccagtttgccggatacaaactggtattctgttctggaggaaagggaggagtggaggtgggctgggccctctcttctcacctttgttttttgttggagtgtttctaataaacttggattctctaacctttaaaaaaaaaaaaaaaaaaaaaaaaaaaaaaaaaaaaaaaaaaaaaaaaaaaa

SEQ ID NO: 92 - protein, 707 aa, Homo sapiens
MSLWQPLVLVLLVLGCCFAAPRQRQSTLVLFPGDLRTNLTDRQLAEEYLYRYGYTRVAEMRGESKSLGPALLLLQKQLSLPETGELDSATLKAMRTPRCGVPDLGRFQTFEGDLKWHHHNITYWIQNYSEDLPRAVIDDAFARAFALWSAVTPLTFTRVYSRDADIVIQFGVAEHGDGYPFDGKDGLLAHAFPPGPGIQGDAHFDDDELWSLGKGVVVPTRFGNADGAACHFPFIFEGRSYSACTTDGRSDGLPWCSTTANYDTDDRFGFCPSERLYTQDGNADGKPCQFPFIFQGQSYSACTTDGRSDGYRWCATTANYDRDKLFGFCPTRADSTVMGGNSAGELCVFPFTFLGKEYSTCTSEGRGDGRLWCATTSNFDSDKKWGFCPDQGYSLFLVAAHEFGHALGLDHSSVPEALMYPMYRFTEGPPLHKDDVNGIRHLYGPRPEPEPRPPTTTTPQPTAPPTVCPTGPPTVHPSERPTAGPTGPPSAGPTGPPTAGPSTATTVPLSPVDDACNVNIFDAIAEIGNQLYLFKDGKYWRFSEGRGSRPQGPFLIADKWPALPRKLDSVFEERLSKKLFFFSGRQVWVYTGASVLGPRRLDKLGLGADVAQVTGALRSGRGKMLLFSGRRLWRFDVKAQMVDPRSASEVDRMFPGVPLDTHDVFQYREKAYFCQDRFYWRVSSRSELNQVDQVGYVTYDILQCPED

SEQ ID NO: 93 - DNA, 1147 bp, Homo sapiens
accaaatcaaccataggtccaagaacaattgtctctggacggcagctatgcgactcaccgtgctgtgtgctgtgtgcctgctgcctggcagcctggccctgccgctgcctcaggaggcgggaggcatgagtgagctacagtgggaacaggctcaggactatctcaagagattttatctctatgactcagaaacaaaaaatgccaacagtttagaagccaaactcaaggagatgcaaaaattctttggcctacctataactggaatgttaaactcccgcgtcatagaaataatgcagaagcccagatgtggagtgccagatgttgcagaatactcactatttccaaatagcccaaaatggacttccaaagtggtcacctacaggatcgtatcatatactcgagacttaccgcatattacagtggatcgattagtgtcaaaggctttaaacatgtggggcaaagagatccccctgcatttcaggaaagttgtatggggaactgctgacatcatgattggctttgcgcgaggagctcatggggactcctacccatttgatgggccaggaaacacgctggctcatgcctttgcgcctgggacaggtctcggaggagatgctcacttcgatgaggatgaacgctggacggatggtagcagtctagggattaacttcctgtatgctgcaactcatgaacttggccattctttgggtatgggacattcctctgatcctaatgcagtgatgtatccaacctatggaaatggagatccccaaaattttaaactttcccaggatgatattaaaggcattcagaaactatatggaaagagaagtaattcaagaaagaaatagaaacttcaggcagaacatccattcattcattcattggattgtatatcattgttgcacaatcagaattgataagcactgttcctccactccatttagcaattatgtcacccttttttattgcagttggtttttgaatgtctttcactccttttaaggataaactcctttatggtgtgactgtgtcttattcatctatacttgcagtgggtagatgtcaataaatgttacatacacaaataaataaaatgtttattccatggtaaatttaaaaaaaaaaaaaaaaaaaaaaaaaaaaa

SEQ ID NO: 94 - protein, 267 aa, Homo sapiens
MRLTVLCAVCLLPGSLALPLPQEAGGMSELQWEQAQDYLKRFYLYDSETKNANSLEAKLKEMQKFFGLPITGMLNSRVIEIMQKPRCGVPDVAEYSLFPNSPKWTSKVVTYRIVSYTRDLPHITVDRLVSKALNMWGKEIPLHFRKVVWGTADIMIGFARGAHGDSYPFDGPGNTLAHAFAPGTGLGGDAHFDEDERWTDGSSLGINFLYAATHELGHSLGMGHSSDPNAVMYPTYGNGDPQNFKLSQDDIKGIQKLYGKRSNSRKK

SEQ ID NO: 95 - DNA, 2574 bp, Homo sapiens
ttggatgttccgggaaagtgatgtgggtaggacaggcggggcgagccgcaggtgccagaacacagattgtataaaaggctgggggctggtggggagcaggggaagggaatgtgaccaggtctaggtctggagtttcagcttggacactgagccaagcagacaagcaaagcaagccaggacacaccatcctgccccaggcccagcttctctcctgccttccaacgccatggggagcaatctcagcccccaactctgcctgatgccctttatcttgggcctcttgtctggaggtgtgaccaccactccatggtctttggcccggccccagggatcctgctctctggagggggtagagatcaaaggcggctccttccgacttctccaagagggccaggcactggagtacgtgtgtccttctggcttctacccgtaccctgtgcagacacgtacctgcagatctacggggtcctggagcaccctgaagactcaagaccaaaagactgtcaggaaggcagagtgcagagcaatccactgtccaagaccacacgacttcgagaacggggaatactggccccggtctccctactacaatgtgagtgatgagatctctttccactgctatgacggttacactctccggggctctgccaatcgcacctgccaagtgaatggccgatggagtgggcagacagcgatctgtgacaacggagcggggtactgctccaacccgggcatccccattggcacaaggaaggtgggcagccagtaccgccttgaagacagcgtcacctaccactgcagccgggggcttaccctgcgtggctcccagcggcgaacgtgtcaggaaggtggctcttggagcgggacggagccttcctgccaagactccttcatgtacgacacccctcaagaggtggccgaagctttcctgtcttccctgacagagaccatagaaggagtcgatgctgaggatgggcacggcccaggggaacaacagaagcggaagatcgtcctggacccttcaggctccatgaacatctacctggtgctagatggatcagacagcattggggccagcaacttcacaggagccaaaaagtgtctagtcaacttaattgagaaggtggcaagttatggtgtgaagccaagatatggtctagtgacatatgccacataccccaaaatttgggtcaaagtgtctgaagcagacagcagtaatgcagactgggtcacgaagcagctcaatgaaatcaattatgaagaccacaagttgaagtcagggactaacaccaagaaggccctccaggcagtgtacagcatgatgagctggccagatgacgtccctcctgaaggctggaaccgcacccgccatgtcatcatcctcatgactgatggattgcacaacatgggcggggacccaattactgtcattgatgagatccgggacttgctatacattggcaaggatcgcaaaaacccaagggaggattatctggatgtctatgtgtttggggtcgggcctttggtgaaccaagtgaacatcaatgctttggcttccaagaaagacaatgagcaacatgtgttcaaagtcaaggatatggaaaacctggaagatgttttctaccaaatgatcgatgaaagccagtctctgagtctctgtggcatggtttgggaacacaggaagggtaccgattaccacaagcaaccatggcaggccaagatctcagtcattcgcccttcaaagggacacgagagctgtatgggggctgtggtgtctgagtactttgtgctgacagcagcacattgtttcactgtggatgacaaggaacactcaatcaaggtcagcgtaggaggggagaagcgggacctggagatagaagtagtcctatttcaccccaactacaacattaatgggaaaaaagaagcaggaattcctgaattttatgactatgacgttgccctgatcaagctcaagaataagctgaaatatggccagactatcaggcccatttgtctcccctgcaccgagggaacaactcgagctttgaggcttcctccaactaccacttgccagcaacaaaaggaagagctgctccctgcacaggatatcaaagctctgtttgtgtctgaggaggagaaaaagctgactcggaaggaggtctacatcaagaatggggataagaaaggcagctgtgagagagatgctcaatatgccccaggctatgacaaagtcaaggacatctcagaggtggtcacccctcggttcctttgtactggaggagtgagtccctatgctgaccccaatacttgcagaggtgattctggcggccccttgatagttcacaagagaagtcgtttcattcaagttggtgtaatcagctggggagtagtggatgtctgcaaaaaccagaagcggcaaaagcaggtacctgctcacgcccgagactttcacatcaacctctttcaagtgctgccctggctgaaggagaaactccaagatgaggatttgggttttctataaggggtttcctgctggacaggggcgtgggattgaattaaaacagctgcgacaac

SEQ ID NO: 96 - protein, 764 aa, Homo sapiens
MGSNLSPQLCLMPFILGLLSGGVTTTPWSLARPQGSCSLEGVEIKGGSFRLLQEGQALEYVCPSGFYPYPVQTRTCRSTGSWSTLKTQDQKTVRKAECRAIHCPRPHDFENGEYWPRSPYYNVSDEISFHCYDGYTLRGSANRTCQVNGRWSGQTAICDNGAGYCSNPGIPIGTRKVGSQYRLEDSVTYHCSRGLTLRGSQRRTCQEGGSWSGTEPSCQDSFMYDTPQEVAEAFLSSLTETIEGVDAEDGHGPGEQQKRKIVLDPSGSMNIYLVLDGSDSIGASNFTGAKKCLVNLIEKVASYGVKPRYGLVTYATYPKIWVKVSEADSSNADWVTKQLNEINYEDHKLKSGTNTKKALQAVYSMMSWPDDVPPEGWNRTRHVIILMTDGLHNMGGDPITVIDEIRDLLYIGKDRKNPREDYLDVYVFGVGPLVNQVNINALASKKDNEQHVFKVKDMENLEDVFYQMIDESQSLSLCGMVWEHRKGTDYHKQPWQAKISVIRPSKGHESCMGAVVSEYFVLTAAHCFTVDDKEHSIKVSVGGEKRDLEIEVVLFHPNYNINGKKEAGIPEFYDYDVALIKLKNKLKYGQTIRPICLPCTEGTTRALRLPPTTTCQQQKEELLPAQDIKALFVSEEEKKLTRKEVYIKNGDKKGSCERDAQYAPGYDKVKDISEVVTPRFLCTGGVSPYADPNTCRGDSGGPLIVHKRSRFIQVGVISWGVVDVCKNQKRQKQVPAHARDFHINLFQVLPWLKEKLQDEDLGFL

SEQ ID NO: 97 - DNA, 510 bp, Homo sapiens
tgaggctgccttataaagcaccaagaggctgccagtgggacattttctcggccctgccagcccccaggaggaaggtgggtctgaatctagcaccatgacggaactagagacagccatgggcatgatcatagacgtcttttcccgatattcgggcagcgagggcagcacgcagaccctgaccaagggggagctcaaggtgctgatggagaaggagctaccaggcttcctgcagagtggaaaagacaaggatgccgtggataaattgctcaaggacctggacgccaatggagatgcccaggtggacttcagtgagttcatcgtgttcgtggctgcaatcacgtctgcctgtcacaagtactttgagaaggcaggactcaaatgatgccctggagatgtcacagattcctggcagagccatggtcccaggcttcccaaaagtgtttgttggcaattattcccctaggctgagcctgctcatgtacctctgattaataaatgcttatgaaatga

SEQ ID NO: 98 - protein, 95 aa, Homo sapiens
MTELETAMGMIIDVFSRYSGSEGSTQTLTKGELKVLMEKELPGFLQSGKDKDAVDKLLKDLDANGDAQVDFSEFIVFVAAITSACHKYFEKAGLK

SEQ ID NO: 99 - DNA, 1103 bp, Homo sapiens; identical to SEQ ID NO: 21

SEQ ID NO: 100 - protein, 107 aa, Homo sapiens; identical to SEQ ID NO: 22

SEQ ID NO: 101 - DNA, 1572 bp, Homo sapiens
aatttctcactgcccctgtgataaactgtggtcactggctgtggcagcaactattataagatgctctgaaaactcttcagacactgaggggcaccagaggagcagactacaagaatggcacacgctatggaaaactcctggacaatcagtaaagagtaccatattgatgaagaagtgggctttgctctgccaaatccacaggaaaatctacctgatttttataatgactggatgttcattgctaaacatctgcctgatctcatagagtctggccagcttcgagaaagagttgagaagttaaacatgctcagcattgatcatctcacagaccacaagtcacagcgccttgcacgtctagttctgggatgcatcaccatggcatatgtgtggggcaaaggtcatggagatgtccgtaaggtcttgccaagaaatattgctgttccttactgccaactctccaagaaactggaactgcctcctattttggtttatgcagactgtgtcttggcaaactggaagaaaaaggatcctaataagcccctgacttatgagaacatggacgttttgttctcatttcgtgatggagactgcagtaaaggattcttcctggtctctctattggtggaaatagcagctgcttctgcaatcaaagtaattcctactgtattcaaggcaatgcaaatgcaagaacgggacactttgctaaaggcgctgttggaaatagcttcttgcttggagaaagcccttcaagtgtttcaccaaatccacgatcatgtgaacccaaaagcatttttcagtgttcttcgcatatatttgtctggctggaaaggcaacccccagctatcagacggtctggtgtatgaagggttctgggaagacccaaaggagtttgcagggggcagtgcaggccaaagcagcgtctttcagtgctttgacgtcctgctgggcatccagcagactgctggtggaggacatgctgctcagttcctccaggacatgagaagatatatgccaccagctcacaggaacttcctgtgctcattagagtcaaatccctcagtccgtgagtttgtcctttcaaaaggtgatgctggcctgcgggaagcttatgacgcctgtgtgaaagctctggtctccctgaggagctaccatctgcaaatcgtgactaagtacatcctgattcctgcaagccagcagccaaaggagaataagacctctgaagacccttcaaaactggaagccaaaggaactggaggcactgatttaatgaatttcctgaagactgtaagaagtacaactgagaaatcccttttgaaggaaggttaatgtaacccaacaagagcacattttatcatagcagagacatctgtatgcattcctgtcattacccattgtaacagagccacaaactaatactatgcaatgttttaccaataatgcaatacaaaagacctcaaaatacctgtgcatttcttgtaggaaaacaacaaaaggtaattatgtgtaattatactagaagttttgtaatctgtatcttatcattggaataaaatgacattcaataaataaaaa

SEQ ID NO: 102 - protein, 403 aa, Homo sapiens [sequence omitted]

SEQ ID NO: 103 - DNA, 3015 bp, Homo sapiens
cagggtttattgttatgtaagttcttgttcagcttcctttgttttctttcacttctgagaatttaactttcgtttctcactcagctcctgtggggaaactcatttgtggagaccagccctctggcttggtgagtgaatctggtttacaccggctcctgccctgccttcactcttctcccctgattcaagactcctctgctttggactgaagcactgcaggagtttgtgaccaagaacttcaagagtcaagacagaaggaagccaagggagcagtgcaatggatttctcagtaaaggtagacatagagaaggaggtgacctgccccatctgcctggagctcctgacagaacctctgagcctagattgtggccacagcttctgccaagcctgcatcactgcaaagatcaaggagtcagtgatcatctcaagaggggaaagcagctgtcctgtgtgtcagaccagattccagcctgggaacctccgacctaatcggcatctggccaacatagttgagagagtcaaagaggtcaagatgagcccacaggaggggcagaagagagatgtctgtgagcaccatggaaaaaaactccagatcttctgtaaggaggatggaaaagtcatttgctgggtttgtgaactgtctcaggaacaccaaggtcaccaaacattccgcataaacgaggtggtcaaggaatgtcaggaaaagctgcaggtagccctgcagaggctgataaaggaggatcaagaggctgagaagctggaagatgacatcagacaagagagaaccgcctggaagaattatatccagatcgagagacagaagattctgaaagggttcaatgaaatgagagtcatcttggacaatgaggagcagagagagctgcaaaagctggaggaaggtgaggtgaatgtgctggataacctggcagcagctacagaccagctggtccagcagaggcaggatgccagcacgctcatctcagatctccagcggaggttgaggggatcgtcagtagagatgctgcaggatgtgattgacgtcatgaaaaggagtgaaagctggacattgaagaagccaaaatctgtttccaagaaactaaagagtgtattccgagtaccagatctgagtgggatgctgcaagttcttaaagagctgacagatgtccagtactactgggtggacgtgatgctgaatccaggcagtgccacttcgaatgttgctatttctgtggatcagagacaagtgaaaactgtacgcacctgcacatttaagaattcaaatccatgtgatttttctgcttttggtgtcttcggctgccaatatttctcttcggggaaatattactgggaagtagatgtgtctggaaagattgcctggatcctgggcgtacacagtaaaataagtagtctgaataaaaggaagagctctgggtttgcttttgatccaagtgtaaattattcaaaagtttactccagatatagacctcaatatggctactgggttataggattacagaatacatgtgaatataatgcttttgaggactcctcctcttctgatcccaaggttttgactctctttatggctgtgcctccctgtcgtattggggttttcctagactatgaggcaggcattgtctcatttttcaatgtcacaaaccacggagcactcatctacaagttctctggatgtcgcttttctcgacctgcttatccgtatttcaatccttggaactgcctagtccccatgactgtgtgcccaccgagctcctgagtgttctcattcctttacccacttctgcatagtagcccttgtgctgagactcagattctgcacctgagttcatctctactgagaccatctcttcctttctttccccttcttttacttagaatgtctttgtattcatttgctagggcttccatagcaaagcatcatagattgctgatttaaactgtaattgtattgccgtactgtgggctggaaatcccaaatctagattccagcagagttggttctttctgaggtctgcaaggaagggctctgttccatgcctctctccttggcttgtagaaggcatcttgtccctatgactcttcacattgtctttatgtacatctctgtgcccaagttttccctttttattaagacaccagtcatactggctcagggcccaccgctaatgccttaatgaaatcattttaacattatattctctacaaagaccttatttccaaataagataatatttggaggtattgggaataaaaactccaacatataaatttgaggaaggcacgatttcactcataacaatcttaccctttcttgcaagagatgcttgtacattattttcctaataccttggtttcactagtagtaaacattattattttttttatatttgcaaaggaaacatatctaatccttcctatagaaagaacagtattgctgtaattccttttcttttcttcctcatttcctctgccccttaaaagattgaagaaagagaaacttgtcaactcatatccacgttatctagcaaagtacataagaatctatcactaagtaatgtatccttcagaatgtgttggtttaccagtgacaccccatattcatcacaaaattaaagcaagaagtccatagtaatttatttgctaatagtggatttttaatgctcagagtttctgaggtcaaattttatcttttcacttacaagctctatgatcttaaataatttacttaatgtattttggtgtattttcctcaaattaatattggtgttcaagactatatctaattcctctgatcactttgagaaacaaacttttattaaatgtaaggcacttttctatgaattttaaatataaaaataaatattgttctgattattactgaaaagatgtcagccatttcaatgtcttgggaaacaattttttgtttttgttctgttttctttttgcttcaataaaacaatagctggctctaaaaaaaaaaaaaaaaaaaaaaaaaaa

SEQ ID NO: 104 - protein, 498 aa, Homo sapiens
MDFSVKVDIEKEVTCPICLELLTEPLSLDCGHSFCQACITAKIKESVIISRGESSCPVCQTRFQPGNLRPNRHLANIVERVKEVKMSPQEGQKRDVCEHHGKKLQIFCKEDGKVICWVCELSQEHQGHQTFRINEVVKECQEKLQVALQRLIKEDQEAEKLEDDIRQERTAWKNYIQIERQKILKGFNEMRVILDNEEQRELQKLEEGEVNVLDNLAAATDQLVQQRQDASTLISDLQRRLRGSSVEMLQDVIDVMKRSESWTLKKPKSVSKKLKSVFRVPDLSGMLQVLKELTDVQYYWVDVMLNPGSATSNVAISVDQRQVKTVRTCTFKNSNPCDFSAFGVFGCQYFSSGKYYWEVDVSGKIAWILGVHSKISSLNKRKSSGFAFDPSVNYSKVYSRYRPQYGYWVIGLQNTCEYNAFEDSSSSDPKVLTLFMAVPPCRIGVFLDYEAGIVSFFNVTNHGALIYKFSGCRFSRPAYPYFNPWNCLVPMTVCPPSS

SEQ ID NO: 105 - DNA, 716 bp, Homo sapiens; identical to SEQ ID NO: 71

SEQ ID NO: 106 - protein, 122 aa, Homo sapiens; identical to SEQ ID NO: 72

SEQ ID NO: 107 - DNA, 1449 bp, Homo sapiens
tcacctgccccacagccgcaccctgcctgtgcctgcaccctggggagcccagagccggcaggggccgaggcggtgggacctcgggggagctcaagcctcgactgtcccctcgctggaggccagaggccaagatgatgtccatgctgggcggcttgcagagatacttccgggtcatcctcctcctcctcctggccctgactctgctcctgctggccggattcctgcactcggacttagagctggacacacccctgtttgggggccaggctgaggggccgccggtcaccaacatcatgttcctgaagacgcacaagacggccagcagcacggtgctcaacatcctctaccgcttcgccgagacccacaacctgtccgtggcgctgcccgccggctcacgcgtccacctgggctacccctggctcttcctggcgcgctacgtggaaggcgtggggtcgcagcagcgcttcaacatcatgtgcaaccacctgaggttcaacctgcctcaggtgcagaaagtcatgcccaacgacaccttctacttctccatcctgaggaaccccgtgttccagctggagtcctccttcatctactacaaaacctacgcccccgccttccggggcgccccgagcctggacgcgttcctggcctcgccgcggacgttctacaacgacagccgccacctcaggaacgtctacgccaagaacaacatgtggttcgacttcggcttcgaccccaacgcgcagtgcgaggagggctacgtgcgcgcgcgcatcgccgaggtggagcggcgcttccggctggtgctcatcgccgagcacctggacgagtccctggtgctgctgcggcgccggctgcgctgggcgctggacgacgtggtggccttcaggctcaactcccgcagcgcgcgctccgtggcccgcctgtcgcccgagacccgggagcgcgcgcggagctggtgcgcgctggactggcgcctgtacgagcatttcaaccgcaccctctgggcgcagctgcgcgccgagctggggccgcggcggctgcgcggggaggtggagcggctgcgcgcccggaggcgcgaactcgcgagcctgtgcctgcaggacggcggcgcgctcaagaaccacacgcagatcagagacccgcgcctgcgcccctaccagtccggcaaggccgacatcctgggttacaacctccggccgggcctggacaaccagacgctgggcgtgtgccagaggcttgtgatgcctgagctccagtacatggcccgcctgtacgccctgcagttcccggagaagcccctcaagaacatcccgttcctgggggcgtagaggggccgggccggggacgaggcctcctgcggacaccagctcctctctccgccgtcaccggggaggccggggatccttgcagggcttctggggcgttgggaaacccaggcccgccggccac

SEQ ID NO: 108 - protein, 398 aa, Homo sapiens
MMSMLGGLQRYFRVILLLLLALTLLLLAGFLHSDLELDTPLFGGQAEGPPVTNIMFLKTHKTASSTVLNILYRFAETHNLSVALPAGSRVHLGYPWLFLARYVEGVGSQQRFNIMCNHLRFNLPQVQKVMPNDTFYFSILRNPVFQLESSFIYYKTYAPAFRGAPSLDAFLASPRTFYNDSRHLRNVYAKNNMWFDFGFDPNAQCEEGYVRARIAEVERRFRLVLIAEHLDESLVLLRRRLRWALDDVVAFRLNSRSARSVARLSPETRERARSWCALDWRLYEHFNRTLWAQLRAELGPRRLRGEVERLRARRRELASLCLQDGGALKNHTQIRDPRLRPYQSGKADILGYNLRPGLDNQTLGVCQRLVMPELQYMARLYALQFPEKPLKNIPFLGA

SEQ ID NO: 109 - DNA, 5392 bp, Homo sapiens
aattcactaatgcattctgctctttttgagagcacagcttctcagatgtgctccttggagctggtgtgcagtgtcctgactgtaagatcaagtccaaacctgttttggaattgaggaaacttctcttttgatctcagcccttggtggtccaggtcttcatgctgctgtgggtgatattactggtcctggctcctgtcagtggacagtttgcaaggacacccaggcccattattttcctccagcctccatggaccacagtcttccaaggagagagagtgaccctcacttgcaagggatttcgcttctactcaccacagaaaacaaaatggtaccatcggtacctcgggaaagaaatactaagagaaaccccagacaatatccttgaggttcaggaatctggagagtacagatgccaggcccagggctcccctctcagtagccctgtgcacttggatttttcttcagcttcgctgatcctgcaagctccactttctgtgtttgaaggagactctgtggttctgaggtgccgggcaaaggcggaagtaacactgaataatactatttacaagaatgataatgtcctggcattccttaataaaagaactgacttccatattcctcatgcatgtctcaaggacaatggtgcatatcgctgtactggatataaggaaagttgttgccctgtttcttccaatacagtcaaaatccaagtccaagagccatttacacgtccagtgctgagagccagctccttccagcccatcagcgggaacccagtgaccctgacctgtgagacccagctctctctagagaggtcagatgtcccgctccggttccgcttcttcagagatgaccagaccctgggattaggctggagtctctccccgaatttccagattactgccatgtggagtaaagattcagggttctactggtgtaaggcagcaacaatgcctcacagcgtcatatctgacagcccgagatcctggatacaggtgcagatccctgcatctcatcctgtcctcactctcagccctgaaaaggctctgaattttgagggaaccaaggtgacacttcactgtgaaacccaggaagattctctgcgcactttgtacaggttttatcatgagggtgtccccctgaggcacaagtcagtccgctgtgaaaggggagcatccatcagcttctcactgactacagagaattcagggaactactactgcacagctgacaatggccttggcgccaagcccagtaaggctgtgagcctctcagtcactgttcccgtgtctcatcctgtcctcaacctcagctctcctgaggacctgatttttgagggagccaaggtgacacttcactgtgaagcccagagaggttcactccccatcctgtaccagtttcatcatgaggatgctgccctggagcgtaggtcggccaactctgcaggaggagtggccatcagcttctctctgactgcagagcattcagggaactactactgcacagctgacaatggctttggcccccagcgcagtaaggcggtgagcctctccatcactgtccctgtgtctcatcctgtcctcaccctcagctctgctgaggccctgacttttgaaggagccactgtgacacttcactgtgaagtccagagaggttccccacaaatcctataccagttttatcatgaggacatgcccctgtggagcagctcaacaccctctgtgggaagagtgtccttcagcttctctctgactgaaggacattcagggaattactactgcacagctgacaatggctttggtccccagcgcagtgaagtggtgagcctttttgtcactgttccagtgtctcgccccatcctcaccctcagggttcccagggcccaggctgtggtgggggacctgctggagcttcactgtgaggccccgagaggctctcccccaatcctgtactggttttatcatgaggatgtcaccctggggagcagctcagccccctctggaggagaagcttctttcaacctctctctgactgcagaacattctggaaactactcatgtgaggccaacaatggcctagtggcccagcacagtgacacaatatcactcagtgttatagttccagtatctcgtcccatcctcaccttcagggctcccagggcccaggctgtggtgggggacctgctggagcttcactgtgaggccctgagaggctcctccccaatcctgtactggttttatcatgaagatgtcaccctgggtaagatctcagccccctctggaggaggggcctccttcaacctctctctgactacagaacattctggaatctactcctgtgaggcagacaatggtccggaggcccagcgcagtgagatggtgacactgaaagttgcagttccggtgtctcgcccggtcctcaccctcagggctcccgggacccatgctgcggtgggggacctgctggagcttcactgtgaggccctgagaggctctcccctgatcctgtaccggttttttcatgaggatgtcaccctaggaaataggtcgtccccctctggaggagcgtccttaaacctctctctgactgcagagcactctggaaactactcctgtgaggccgacaatggcctcggggcccagcgcagtgagacagtgacactttatatcacagggctgaccgcgaacagaagtggcccttttgccacaggagtcgccgggggcctgctcagcatagcaggccttgctgcgggggcactgctgctctactgctggctctcgagaaaagcagggagaaagcctgcctctgaccccgccaggagccctccagactcggactcccaagagcccacctatcacaatgtaccagcctgggaagagctgcaaccagtgtacactaatgcaaatcctagaggagaaaatgtggtttactcagaagtacggatcatccaagagaaaaagaaacatgcagtggcctctgaccccaggcatctcaggaacaagggttcccctatcatctactctgaagttaaggtggcgtcaaccccggtttccggatccctgttcttggcttcctcagctcctcacagatgagtccacacgtctctccaactgctgtttcagcctctgcaccccaaagttccccttgggggagaagcagcattgaagtgggaagatttaggctgccccagaccatatctactggcctttgtttcacatgtcctcattctcagtctgaccagaatgcagggccctgctggactgtcacctgtttcccagttaaagccctgactggcaggttttttaatccagtggcaaggtgctcccactccagggcccagcacatctcctggattccttagtgggcttcagctgtgattgctgttctgagtactgctctcatcacacccccacagagggggtcttaccacacaaagggagagtgggccttcaggagatgccgggctggcctaacagctcaggtgctcctaaactccgacacagagttcctgctttgggtggatgcatttctcaattgtcatcagcctggtggggctactgcagtgtgctgccaaatgggacagcacacagcctgtgcacatgggacatgtgatgggtctccccacgggggctgcatttcacactcctccacctgtctcaaactctaaggtcggcacttgacaccaaggtaacttctctcctgctcatgtgtcagtgtctacctgcccaagtaagtggctttcatacaccaagtcccaagttcttcccatcctaacagaagtaacccagcaagtcaaggccaggaggaccaggggtgcagacagaacacatactggaacacaggaggtgctcaattactatttgactgactgactgaatgaatgaatgaatgaggaagaaaactgtgggtaatcaaactggcataaaatccagtgcactccctaggaaatccgggaggtattctggcttccctaagaaacaacggaagagaaggagcttggatgaggaaactgttcagcaagaggaagggcttctcacactttcatgtgcttgtggatcacctgaggatcctgtgaaaatacagatactgattcagtgggtctgtgtagagcctgagactgccattctaacatgttcccaggggatgctgatgctgctggccctgggactgcactgcatgcatgtgaagccctataggtctcagcagaggcccatggagagggaatgtgtggctctggctgcccagggcccaactcggttcacacggatcgtgctgctccctggccagcctttggccacagcaccaccagctgctgttgctgagagagcttcttctctgtgacatgttggctttcatcagccaccctgggaagcggaaagtagctgccactatctttgtttccccacctcaggcctcacactttcccatgaaaagggtgaatgtatataacctgagccctctccattcagagttgttctcccatctctgagcaatgggatgttctgttccgcttttatgatatccatcacatcttatcttgatctttgctcccagtggattgtacagtgatgacttttaagccccacggccctgaaataaaatccttccaagggcattggaagctctctccacctgaaccatggcttttcatgcttccaagtgtcagggccttgcccagatagacagggctgactctgctgccccaacctttcaaggaggaaaccagacacctgagacaggagcctgtatgcagcccagtgcagccttgcagaggacaaggctggaggcatttgtcatcactacagatatgcaactaaaatagacgtggagcaagagaaatgcattcccaccgaggccgcttttttaggcctagttgaaagtcaagaaggacagcagcaagcataggctcaggattaaagaaaaaaatctgctcacagtttgttctggaggtcacatcaccaacaaagctcacgccctatgcagttctgagaaggtggaggcaccaggctcaaaagaggaaatttagaatttctcattgggagagtaaggtacccccatcccagaatgataactgcacagtggcagaacaaactccaccctaatgtgggtggaccccatccagtctgttgaaggcctgagtgtaacaaaagggcttattcttcctcaagtaagggggaactcctgctttgggctgggacataagtttttctgctttcagacgcaaactgaaaaatggctcttcttgggtcttgagcttgctggcatatggactgaaagaaactatgctattggatctcctggatctccagcttgctgactgcagatcttgagatatgtcagcctctacagtcacaagagctaattcattctaataaaccaatctttctgtaaa

SEQ ID NO: 110 - protein, 977 aa, Homo sapiens
MLLWVILLVLAPVSGQFARTPRPIIFLQPPWTTVFQGERVTLTCKGFRFYSPQKTKWYHRYLGKEILRETPDNILEVQESGEYRCQAQGSPLSSPVHLDFSSASLILQAPLSVFEGDSVVLRCRAKAEVTLNNTIYKNDNVLAFLNKRTDFHIPHACLKDNGAYRCTGYKESCCPVSSNTVKIQVQEPFTRPVLRASSFQPISGNPVTLTCETQLSLERSDVPLRFRFFRDDQTLGLGWSLSPNFQITAMWSKDSGFYWCKAATMPHSVISDSPRSWIQVQIPASHPVLTLSPEKALNFEGTKVTLHCETQEDSLRTLYRFYHEGVPLRHKSVRCERGASISFSLTTENSGNYYCTADNGLGAKPSKAVSLSVTVPVSHPVLNLSSPEDLIFEGAKVTLHCEAQRGSLPILYQFHHEDAALERRSANSAGGVAISFSLTAEHSGNYYCTADNGFGPQRSKAVSLSITVPVSHPVLTLSSAEALTFEGATVTLHCEVQRGSPQILYQFYHEDMPLWSSSTPSVGRVSFSFSLTEGHSGNYYCTADNGFGPQRSEVVSLFVTVPVSRPILTLRVPRAQAVVGDLLELHCEAPRGSPPILYWFYHEDVTLGSSSAPSGGEASFNLSLTAEHSGNYSCEANNGLVAQHSDTISLSVIVPVSRPILTFRAPRAQAVVGDLLELHCEALRGSSPILYWFYHEDVTLGKISAPSGGGASFNLSLTTEHSGIYSCEADNGPEAQRSEMVTLKVAVPVSRPVLTLRAPGTHAAVGDLLELHCEALRGSPLILYRFFHEDVTLGNRSSPSGGASLNLSLTAEHSGNYSCEADNGLGAQRSETVTLYITGLTANRSGPFATGVAGGLLSIAGLAAGALLLYCWLSRKAGRKPASDPARSPPDSDSQEPTYHNVPAWEELQPVYTNANPRGENVVYSEVRIIQEKKKHAVASDPRHLRNKGSPIIYSEVKVASTPVSGSLFLASSAPHR

SEQ ID NO: 111 - DNA, 3143 bp, Homo sapiens; identical to SEQ ID NO: 67

SEQ ID NO: 112 - protein, 544 aa, Homo sapiens; identical to SEQ ID NO: 68

SEQ ID NO: 113 - DNA, 2213 bp, Homo sapiens; identical to SEQ ID NO: 41

SEQ ID NO: 114 - protein, 627 aa, Homo sapiens [sequence omitted]

SEQ ID NO: 115 - DNA, 2387 bp, Homo sapiens; identical to SEQ ID NO: 91

SEQ ID NO: 116 - protein, 707 aa, Homo sapiens; identical to SEQ ID NO: 92

SEQ ID NO: 117 - DNA, 1103 bp, Homo sapiens; identical to SEQ ID NO: 21

SEQ ID NO: 118 - protein, 107 aa, Homo sapiens; identical to SEQ ID NO: 22

SEQ ID NO: 119 - DNA, 1123 bp, Homo sapiens
ctatagaagagctatgacgtcgcatgcacgcgtacgtaagctcggaattcggctcgaggcttctcgcacagcttcccgacgcgtctgctgagccccatggcccacgccacgctctccgccgcccccagcaatccccggctcctgcgggtggcgctgctgctcctgctcctggtggccgccagccggcgcgcagcaggagcgtccgtggtcactgaactgcgctgccagtgcttgcagacactgcagggaattcacctcaagaacatccaaagtgtgaatgttaggtcccccggaccccactgcgcccaaaccgaagtcatagccacactcaagaatgggaagaaagcttgtctcaaccccgcatcccccatggttcagaaaatcatcgaaaagatactgaacaaggggagcaccaactgacaggagagaagtaagaagcttatcagcgtatcattgacacttcctgcagggtggtccctgcccttaccagagctgaaaatgaaaaagagaacagcagctttctagggacagctggaaaggacttaatgtgtttgactatttcttacgagggttctacttatttatgtatttatttttgaaagcttgtattttaatattttacatgctgttatttaaagatgtgagtgtgtttcatcaaacatagctcagtcctgattatttaattggaatatgatgggttttaaatgtgtcattaaactaatatttagtgggagaccataatgtgtcagccaccttgataaatgacagggtggggaactggagggtggggggattgaaatgcaagcaattagtggatcactgttagggtaagggaatgtatgtacacatctattttttatactttttttttaaaaaaaaaatgtcagttgttatttattcaaattatctcacattatgtgttcaacatttttatgctgaagtttcccttagacattttatgtcttgcttgtagggcataatgccttgtttaatgtccattctgcagcgtttctctttcccttggaaaagagaatttatcattactgttacatttgtacaaatgacatgataataaaagttttatgaaaaaaaaaaaaaaaaaaaaaaaaaaaaaaaaaaaagg

SEQ ID NO: 120 - protein, 107 aa, Homo sapiens
MAHATLSAAPSNPRLLRVALLLLLLVAASRRAAGASVVTELRCQCLQTLQGIHLKNIQSVNVRSPGPHCAQTEVIATLKNGKKACLNPASPMVQKIIEKILNKGSTN

SEQ ID NO: 121 - DNA, 1498 bp, Homo sapiens; identical to SEQ ID NO: 19

SEQ ID NO: 122 - protein, 269 aa, Homo sapiens; identical to SEQ ID NO: 20

SEQ ID NO: 123 - DNA, 1726 bp, Homo sapiens; identical to SEQ ID NO: 5

SEQ ID NO: 124 - protein, 378 aa, Homo sapiens; identical to SEQ ID NO: 6

SEQ ID NO: 125 - DNA, 1301 bp, Homo sapiens
gggaggagagaaaagccatggccgacaaggtcctgaaggagaagagaaagctgtttatccgttccatgggtgaaggtacaataaatggcttactggatgaattattacagacaagggtgctgaacaaggaagagatggagaaagtaaaacgtgaaaatgctacagttatggataagacccgagctttgattgactccgttattccgaaaggggcacaggcatgccaaatttgcatcacatacatttgtgaagaagacagttacctggcagggacgctgggactctcagcagctcctcaggcagtgcaggacaacccagctatgcccacatcctcaggctcagaagggaatgtcaagctttgctccctagaagaagctcaaaggatatggaaacaaaagtcggcagagatttatccaataatggacaagtcaagccgcacacgtcttgctctcattatctgcaatgaagaatttgacagtattcctagaagaactggagctgaggttgacatcacaggcatgacaatgctgctacaaaatctggggtacagcgtagatgtgaaaaaaaatctcactgcttcggacatgactacagagctggaggcatttgcacaccgcccagagcacaagacctctgacagcacgttcctggtgttcatgtctcatggtattcgggaaggcatttgtgggaagaaacactctgagcaagtcccagatatactacaactcaatgcaatctttaacatgttgaataccaagaactgcccaagtttgaaggacaaaccgaaggtgatcatcatccaggcctgccgtggtgacagccctggtgtggtgtggtttaaagattcagtaggagtttctggaaacctatctttaccaactacagaagagtttgaggatgatgctattaagaaagcccacatagagaaggattttatcgctttctgctcttccacaccagataatgtttcttggagacatcccacaatgggctctgtttttattggaagactcattgaacatatgcaagaatatgcctgttcctgtgatgtggaggaaattttccgcaaggttcgattttcatttgagcagccagatggtagagcgcagatgcccaccactgaaagagtgactttgacaagatgtttctacctcttcccaggacattaaaataaggaaactgtatgaatgtctgtgggcaggaagtgaagagatccttctgtaaaggtttttggaattatgtctgctgaataataaacttttttgaaataataaatctggtagaaaaatgaaaaaaaaaaa

SEQ ID NO: 126 - protein, 383 aa, Homo sapiens
MADKVLKEKRKLFIRSMGEGTINGLLDELLQTRVLNKEEMEKVKRENATVMDKTRALIDSVIPKGAQACQICITYICEEDSYLAGTLGLSAAPQAVQDNPAMPTSSGSEGNVKLCSLEEAQRIWKQKSAEIYPIMDKSSRTRLALIICNEEFDSIPRRTGAEVDITGMTMLLQNLGYSVDVKKNLTASDMTTELEAFAHRPEHKTSDSTFLVFMSHGIREGICGKKHSEQVPDILQLNAIFNMLNTKNCPSLKDKPKVIIIQACRGDSPGVVWFKDSVGVSGNLSLPTTEEFEDDAIKKAHIEKDFIAFCSSTPDNVSWRHPTMGSVFIGRLIEHMQEYACSCDVEEIFRKVRFSFEQPDGRAQMPTTERVTLTRCFYLFPGH

SEQ ID NO: 127 - DNA, 1406 bp, Homo sapiens
gagggcgccatgaggagcctgtgctgcgccccactcctgctcctcttgctgctgccgccgctgctgctcacgccccgcgctggggacgccgccgtgatcaccggggcttgtgacaaggactcccaatgtggtggaggcatgtgctgtgctgtcagtatctgggtcaagagcataaggatttgcacacctatgggcaaactgggagacagctgccatccactgactcgtaaagttccattttttgggcggaggatgcatcacacttgcccatgtctgccaggcttggcctgtttacggacttcatttaaccgatttatttgtttagcccaaaagtaatcgctctggagtagaaaccaaatgtgaatagccacatcttacctgtaaagtcttacttgtgattgtgccaaacaaaaaatgtgccagaaagaaatgctcttgcttcctcaactttccaagtaacatttttatctttgatttgtaaatgatttttttttttttttttatcgaaagagaattttacttttggatagaaatatgaagtgtaaggcattatggaactggttcttatttccctgtttgtgttttggtttgatttggcttttttcttaaatgtcaaaaacgtacccattttcacaaaaatgaggaaaataagaatttgatattttgttagaaaaacttttttttttttttctcaccaccccaagccccatttgtgccctgccgcacaaatacacctacagcttttggtcccttgcctcttccacctcaaagaatttcaaggctcttaccttactttatttttgtccatttctcttccctcctcttgcattttaaagtggagggtttgtctctttgagtttgatggcagaatcactgatgggaatccagctttttgctggcatttaaatagtgaaaagagtgtatatgtgaacttgacactccaaactcctgtcatggcacggaagctaggagtgctgctggacccttcctaaacctgtcactcaagaggacttcagctctgctgttgggctggtgtgtggacagaaggaatggaaagccaaattaatttagtccagatttctaggtttgggtttttctaaaaataaaagattacatttacttcttttactttttataaagttttttttccttagtctcctacttagagatattctagaaaatgtcacttgaagaggaagtatttattttaatctggcacaacactaattaccatttttaaagcggtattaagttgtaatttaaaccttgtttgtaactgaaaggtcgattgtaatggattgccgtttgtacctgtatcagtattgctgtgtaaaaattctgtatcagaataataacagtactgtatatcatttgatttattttaatattatatccttatttttgtc

SEQ ID NO: 128 - protein, 108 aa, Homo sapiens
MRSLCCAPLLLLLLLPPLLLTPRAGDAAVITGACDKDSQCGGGMCCAVSIWVKSIRICTPMGKLGDSCHPLTRKVPFFGRRMHHTCPCLPGLACLRTSFNRFICLAQK

SEQ ID NO: 129 - DNA, 4206 bp, Homo sapiens
ataatacctaccttgcaggaccacgacaggattaagtgaggaaaaacccccatgagagtgttttgccattgtcaagtgagcctgagggaggctgaggggggatcaggctgtatcatgcccccgaggacaaactttccagtttaccctgctccctctctctgtccctaggctgccccaggccctgtgcagacacaccaggccctcagccgcagcccatggacctgcgggtgggccagcggcccccagtggagcccccaccagagcccacattgctggccctgcagcgtccccagcgcctgcaccaccacctcttcctagcaggcctgcagcagcagcgctcggtggagcccatgaggctctccatggacacgccgatgcccgagttgcaggtgggaccccaggaacaagagctgcggcagcttctccacaaggacaagagcaagcgaagtgctgtagccagcagcgtggtcaagcagaagctagcggaggtgattctgaaaaaacagcaggcggccctagaaagaacagtccatcccaacagccccggcattccctacagaaccctggagcccctggagacggaaggagccacccgctccatgctcagcagctttttgcctcctgttcccagcctgcccagtgaccccccagagcacttccctctgcgcaagacagtctctgagcccaacctgaagctgcgctataagcccaagaagtccctggagcggaggaagaatccactgctccgaaaggagagtgcgccccccagcctccggcggcggcccgcagagaccctcggagactcctccccaagtagtagcagcacgcccgcatcagggtgcagctcccccaatgacagcgagcacggccccaatcccatcctgggctcggaggcgctcttgggccagcggctgcggctgcaggagacttctgtggccccgttcgccttgccgacagtgtccttgctgcccgcaatcactctggggctgcccgcccctgccagggctgacagtgaccgcaggacccatccgactctgggccctcgggggccaatcctggggagcccccacactcccctcttcctgccccatggcttggagcccgaggctgggggcaccttgccctctcgcctgcagcccattctcctcctggacccctcaggctctcatgccccgctgctgactgtgcccgggcttgggcccttgcccttccactttgcccagtccttaatgaccaccgagcggctctctgggtcaggcctccactggccactgagccggactcgctcagagcccctgccccccagtgccaccgctcccccaccgccgggccccatgcagccccgcctggagcagctcaaaactcacgtccaggtgatcaagaggtcagccaagccgagtgagaagccccggctgcggcagataccctcggctgaagacctggagacagatggcgggggaccgggccaggtggtggacgatggcctggagcacagggagctgggccatgggcagcctgaggccagaggccccgctcctctccagcagcaccctcaggtgttgctctgggaacagcagcgactggctgggcggctcccccggggcagcaccggggacactgtgctgcttcctctggcccagggtgggcaccggcctctgtcccgggctcagtcttccccagccgcacctgcctcactgtcagccccagagcctgccagccaggcccgagtcctctccagctcagagacccctgccaggaccctgcccttcaccacagggctgatctatgactcggtcatgctgaagcaccagtgctcctgcggtgacaacagcaggcacccggagcacgccggccgcatccagagcatctggtcccggctgcaggagcgggggctccggagccagtgtgagtgtctccgaggccggaaggcctccctggaagagctgcagtcggtccactctgagcggcacgtgctcctctacggcaccaacccgctcagccgcctcaaactggacaacgggaagctggcagggctcctggcacagcggatgtttgtgatgctgccctgtggtggggttggggtggacactgacaccatctggaatgagcttcattcctccaatgcagcccgctgggccgctggcagtgtcactgacctcgccttcaaagtggcttctcgtgagctaaagaatggtttcgctgtggtgcggcccccaggacaccatgcagatcattcaacagccatgggcttctgcttcttcaactcagtggccatcgcctgccggcagctgcaacagcagagcaaggccagcaagatcctcattgtagactgggacgtgcaccatggcaacggcacccagcaaaccttctaccaagaccccagtgtgctctacatctccctgcatcgccatgacgacggcaacttcttcccggggagtggggctgtggatgaggtaggggctggcagcggtgagggcttcaatgtcaatgtggcctgggctggaggtctggacccccccatgggggatcctgagtacctggctgctttcaggatagtcgtgatgcccatcgcccgagagttctctccagacctagtcctggtgtctgctggatttgatgctgctgagggtcacccggccccactgggtggctaccatgtttctgccaaatgttttggatacatgacgcagcaactgatgaacctggcaggaggcgcagtggtgctggccttggagggtggccatgacctcacagccatctgtgacgcctctgaggcctgtgtggctgctcttctgggtaacagggtggatcccctttcagaagaaggctggaaacagaaacccaacctcaatgccatccgctctctggaggccgtgatccgggtgcacagtaaatactggggctgcatgcagcgcctggcctcctgtccagactcctgggtgcctagagtgccaggggctgacaaagaagaagtggaggcagtgaccgcactggcgtccctctctgtgggcatcctggctgaagataggccctcggagcagctggtggaggaggaagaacctatgaatctctaaggctctggaaccatctgcccgcccaccatgcccttgggacctggttctcttctaacccctggcaatagcccccattcctgggtctttagagatcctgtgggcaagtagttggaaccagagaacagcctgcctgctttgacagttatcccagggagcgtgagaaaatccctgggtctagaatgggaactggagaggaccctgagaggagacgggctgggcggcgacccccacagggctctcgagaacagattctcccctccagtatgggccctggctgtggcccccattcctcaggactgcacagaggaggactggctccggctccgtcgggctcacccttaaccactattcctggctctgcaaaccccagactttgcacacagccccaggctccacacagaaatgtgaacttggcctcagacaggctggcccttcctaggctctaggggctaggggggagtggggagccaagaggtcccatattcctgagtgcaggggtagtccctctcacctgcttcctcagacgactctggaagcttccctctaccaccgggcactgagacgaagctccctgacagccgagactggcagccctccatctggtccgtaccctcgccagaggcccccctacatcaacctcctggcgatgccctggtggagcagatgggtgctctgggagtcctgtgcttcctgatccaatggtgccaaacccttcatctcccccagaagcgcagcatacccctgggacccctcggccactgcccactcggggagccttctctgtttctggggcctcccccaccatagctctgattcccaccccacataggaatagcctgactgagggggaaggggtgggagagaagatacagacatggaggaggggaggctgctctggcaaagtcttcaaggcttttgggggtccaggcctggggtcaagaaggaaaatgtgtgtgagcatgtgtgtgagtgaggcgtgtgtgtgagcgtgtgtgtgagtgaggcgtgtgtgtgtgtctttcctaggacccaccataccctgtgtatgtatgcatgtttttgtaaaaaggaagaaaatggaaaaaaatctgaacaataaatgttttatttgctttaaaaaaaaaaaaaaaaa

SEQ ID NO: 130 - protein, 952 aa, Homo sapiens
MDLRVGQRPPVEPPPEPTLLALQRPQRLHHHLFLAGLQQQRSVEPMRLSMDTPMPELQVGPQEQELRQLLHKDKSKRSAVASSVVKQKLAEVILKKQQAALERTVHPNSPGIPYRTLEPLETEGATRSMLSSFLPPVPSLPSDPPEHFPLRKTVSEPNLKLRYKPKKSLERRKNPLLRKESAPPSLRRRPAETLGDSSPSSSSTPASGCSSPNDSEHGPNPILGSEALLGQRLRLQETSVAPFALPTVSLLPAITLGLPAPARADSDRRTHPTLGPRGPILGSPHTPLFLPHGLEPEAGGTLPSRLQPILLLDPSGSHAPLLTVPGLGPLPFHFAQSLMTTERLSGSGLHWPLSRTRSEPLPPSATAPPPPGPMQPRLEQLKTHVQVIKRSAKPSEKPRLRQIPSAEDLETDGGGPGQVVDDGLEHRELGHGQPEARGPAPLQQHPQVLLWEQQRLAGRLPRGSTGDTVLLPLAQGGHRPLSRAQSSPAAPASLSAPEPASQARVLSSSETPARTLPFTTGLIYDSVMLKHQCSCGDNSRHPEHAGRIQSIWSRLQERGLRSQCECLRGRKASLEELQSVHSERHVLLYGTNPLSRLKLDNGKLAGLLAQRMFVMLPCGGVGVDTDTIWNELHSSNAARWAAGSVTDLAFKVASRELKNGFAVVRPPGHHADHSTAMGFCFFNSVAIACRQLQQQSKASKILIVDWDVHHGNGTQQTFYQDPSVLYISLHRHDDGNFFPGSGAVDEVGAGSGEGFNVNVAWAGGLDPPMGDPEYLAAFRIVVMPIAREFSPDLVLVSAGFDAAEGHPAPLGGYHVSAKCFGYMTQQLMNLAGGAVVLALEGGHDLTAICDASEACVAALLGNRVDPLSEEGWKQKPNLNAIRSLEAVIRVHSKYWGCMQRLASCPDSWVPRVPGADKEEVEAVTALASLSVGILAEDRPSEQLVEEEEPMNL

SEQ ID NO: 131 - DNA, 1970 bp, Homo sapiens
aggaaacggtttattaggagggagtggtggagctgggccaggcaggaagacgctggaataagaaacatttttgctccagcccccatcccagtcccgggaggctgccgcgccagctgcgccgagcgagcccctccccggctccagcccggtccggggccgcgccggaccccagcccgccgtccagcgctggcggtgcaactgcggccgcgcggtggaggggaggtggccccggtccgccgaaggctagcgccccgccacccgcagagcgggcccagagggaccatgaccttgggctcccccaggaaaggccttctgatgctgctgatggccttggtgacccagggagaccctgtgaagccgtctcggggcccgctggtgacctgcacgtgtgagagcccacattgcaaggggcctacctgccggggggcctggtgcacagtagtgctggtgcgggaggaggggaggcacccccaggaacatcggggctgcgggaacttgcacagggagctctgcagggggcgccccaccgagttcgtcaaccactactgctgcgacagccacctctgcaaccacaacgtgtccctggtgctggaggccacccaacctccttcggagcagccgggaacagatggccagctggccctgatcctgggccccgtgctggccttgctggccctggtggccctgggtgtcctgggcctgtggcatgtccgacggaggcaggagaagcagcgtggcctgcacagcgagctgggagagtccagtctcatcctgaaagcatctgagcagggcgacacgatgttgggggacctcctggacagtgactgcaccacagggagtggctcagggctccccttcctggtgcagaggacagtggcacggcaggttgccttggtggagtgtgtgggaaaaggccgctatggcgaagtgtggcggggcttgtggcacggtgagagtgtggccgtcaagatcttctcctcgagggatgaacagtcctggttccgggagactgagatctataacacagtattgctcagacacgacaacatcctaggcttcatcgcctcagacatgacctcccgcaactcgagcacgcagctgtggctcatcacgcactaccacgagcacggctccctctacgactttctgcagagacagacgctggagccccatctggctctgaggctagctgtgtccgcggcatgcggcctggcgcacctgcacgtggagatcttcggtacacagggcaaaccagccattgcccaccgcgacttcaagagccgcaatgtgctggtcaagagcaacctgcagtgttgcatcgccgacctgggcctggctgtgatgcactcacagggcagcgattacctggacatcggcaacaacccgagagtgggcaccaagcggtacatggcacccgaggtgctggacgagcagatccgcacggactgctttgagtcctacaagtggactgacatctgggcctttggcctggtgctgtgggagattgcccgccggaccatcgtgaatggcatcgtggaggactatagaccacccttctatgatgtggtgcccaatgaccccagctttgaggacatgaagaaggtggtgtgtgtggatcagcagacccccaccatccctaaccggctggctgcagacccggtcctctcaggcctagctcagatgatgcgggagtgctggtacccaaacccctctgcccgactcaccgcgctgcggatcaagaagacactacaaaaaattagcaacagtccagagaagcctaaagtgattcaatagcccaggagcacctgattcctttctgcctgcagggggctgggggggtggggggcagtggatggtgccctatctgggtagaggtagtgtgagtgtggtgtgtgctggggatgggcagctgcgcctgcctgctcggcccccagcccacccagccaaaaatacagctgggctgaaacctg

SEQ ID NO: 132 - protein, 503 aa, Homo sapiens
MTLGSPRKGLLMLLMALVTQGDPVKPSRGPLVTCTCESPHCKGPTCRGAWCTVVLVREEGRHPQEHRGCGNLHRELCRGRPTEFVNHYCCDSHLCNHNVSLVLEATQPPSEQPGTDGQLALILGPVLALLALVALGVLGLWHVRRRQEKQRGLHSELGESSLILKASEQGDTMLGDLLDSDCTTGSGSGLPFLVQRTVARQVALVECVGKGRYGEVWRGLWHGESVAVKIFSSRDEQSWFRETEIYNTVLLRHDNILGFIASDMTSRNSSTQLWLITHYHEHGSLYDFLQRQTLEPHLALRLAVSAACGLAHLHVEIFGTQGKPAIAHRDFKSRNVLVKSNLQCCIADLGLAVMHSQGSDYLDIGNNPRVGTKRYMAPEVLDEQIRTDCFESYKWTDIWAFGLVLWEIARRTIVNGIVEDYRPPFYDVVPNDPSFEDMKKVVCVDQQTPTIPNRLAADPVLSGLAQMMRECWYPNPSARLTALRIKKTLQKISNSPEKPKVIQ

SEQ ID NO: 133 - DNA, 2464 bp, Homo sapiens
cggaaacttgggggagtgcacagaagaacttcgggagcgcacgcgggaccagggaccaggctgagactcggggcgccagtccgggcaggggcagcgggacgcggccggagatgccctgtatccaagcccaatatgggacaccagcaccgagtccgggaccccgtgaccacctggcaagcgaccccctgacccctgagttcatcaagcccaccatggacctggccagccccgaggcagcccccgctgcccccactgccctgcccagcttcagcacgttcatggacggctacacaggagagtttgacaccttcctctaccagctgccaggaacagtccagccatgctcctcagcctcctcctcggcctcctccacatcctcgtcctcagccacctcccctgcctctgcctccttcaagttcgaggacttccaggtgtacggctgctaccccggccccctgagcggcccagtggatgaggccctgtcctccagtggctctgactactatggcagcccctgctcggccccgtcgccctccacgcccagcttccagccgccccagctctctccctgggatggctccttcggccacttctcgcccagccagacttacgaaggcctgcgggcatggacagagcagctgcccaaagcctctgggcccccacagcctccagccttcttttccttcagtcctcccactggccccagccccagcctggcccagagccccctgaagttgttcccctcacaggccacccaccagctgggggagggagagagctattccatgcctacggccttcccaggtttggcacccacttctccacaccttgagggctcggggatactggatacacccgtgacctcaaccaaggcccggagcggggccccaggtccaagtgaaggccgctgtgctgtgtgtggggacaacgcttcatgccagcattatggtgtccgcacatgtgagggctgcaagggcttcttcaagcgcacagtgcagaaaaacgccaagtacatctgcctggctaacaaggactgccctgtggacaagaggcggcgaaaccgctgccagttctgccgcttccagaagtgcctggcggtgggcatggtgaaggaagttgtccgaacagacagcctgaaggggcggcggggccggctaccttcaaaacccaagcagcccccagatgcctcccctgccaatctcctcacttccctggtccttgcacacctggattcagggcccagcactgccaaactggactactccaagttccaggagctggtgctgccccactttgggaaggaagatgctggggatgtacagcagttctacgacctgctctccggttctctggaggtcatccgaaagtgggcggagaagatccctggctttgctgagctgtcaccggctgaccaggacctgttgctggagtcggccttcctggagctcttcatcctccgcctggcgtacaggtctaagccaggcgagggcaagctcatcttctgctcaggcctggtgctacaccggctgcagtgtgcccgtggcttcggggactggattgacagtatcctggccttctcaaggtccctgcacagcttgcttgtcgatgtccctgccttcgcctgcctctctgcccttgtcctcatcaccgaccggcatgggctgcaggagccgcggcgggtggaggagctgcagaaccgcatcgccagctgcctgaaggagcacgtggcagctgtggcgggcgagccccagccagccagctgcctgtcacgtctgttgggcaaactgcccgagctgcggaccctgtgcacccagggcctgcagcgcatcttctacctcaagctggaggacttggtgccccctccacccatcattgacaagatcttcatggacacgctgcccttctgacccctgcctgggaacacgtgtgcacatgcgcactctcatatgccaccccatgtgcctttagtccacggacccccagagcacccccaagcctgggcttgagctgcagaatgactccaccttctcacctgctccaggaggtttgcagggagctcaagcccttggggagggggatgccttcatgggggtgaccccacgatttgtcttatcccccccagcctggccccggcctttatgttttttgtaagataaaccgtttttaacacatagcgccgtgctgtaaataagcccagtgctgctgtaaatacaggaagaaagagcttgaggtgggagcggggctgggaggaagggatgggccccgccttcctgggcagcctttccagcctcctgcctggctctctcttcctaccctccttccacatgtacataaactgtcactctaggaagaagacaaatgacagattctgacatttatatttgtgtattttcctggatttatagtatgtgacttttctgattaatatatttaatatattgaataaaaaatagacatgtagttg

SEQ ID NO: 134 - protein, 598 aa, Homo sapiens
MPCIQAQYGTPAPSPGPRDHLASDPLTPEFIKPTMDLASPEAAPAAPTALPSFSTFMDGYTGEFDTFLYQLPGTVQPCSSASSSASSTSSSSATSPASASFKFEDFQVYGCYPGPLSGPVDEALSSSGSDYYGSPCSAPSPSTPSFQPPQLSPWDGSFGHFSPSQTYEGLRAWTEQLPKASGPPQPPAFFSFSPPTGPSPSLAQSPLKLFPSQATHQLGEGESYSMPTAFPGLAPTSPHLEGSGILDTPVTSTKARSGAPGPSEGRCAVCGDNASCQHYGVRTCEGCKGFFKRTVQKNAKYICLANKDCPVDKRRRNRCQFCRFQKCLAVGMVKEVVRTDSLKGRRGRLPSKPKQPPDASPANLLTSLVLAHLDSGPSTAKLDYSKFQELVLPHFGKEDAGDVQQFYDLLSGSLEVIRKWAEKIPGFAELSPADQDLLLESAFLELFILRLAYRSKPGEGKLIFCSGLVLHRLQCARGFGDWIDSILAFSRSLHSLLVDVPAFACLSALVLITDRHGLQEPRRVEELQNRIASCLKEHVAAVAGEPQPASCLSRLLGKLPELRTLCTQGLQRIFYLKLEDLVPPPPIIDKIFMDTLPF

SEQ ID NO: 135 - DNA, 1978 bp, Homo sapiens
agaaactcacacaccttgacaatctgtctgtccgtctgcagctgcgtgactgtctgtctctgccatgtctctctccccatgccgggcccagaggggcttcagcgctcgctcagcctgttctgctcgctcaaggggccgcagcaggggaggcttcagcagcaggggcggcttcagcagcaggagccttaattcctttggggggtgcctggaaggctctcgtgggagtacctgggggtcagggggtaggctgggggtgcggtttggggagtggagtggtgggcctgggctctccctgtgccctccggggggcatccaagaagtgaccatcaaccagaatccgctgaccccactgaagattgagatcgatccccagttccaggtggtgcggacgcaggagacccaggagatcagaaccctcaacaaccagtttgcttccttcattgacaaggtgcggttcctggagcagcagaacaaggtcctggagacgaagtggcatctgctgcagcaacaggggttgagtggcagccagcagggcctggagcctgtctttgaggcctgcctggatcagctcaggaagcagctggagcagctccagggagaacgaggggctctggatgctgagttgaaggcctgccgggaccaggaggaggagtataagtccaagtatgaggaggaggcccacaggcgtgccacacttgagaacgactttgtggtcctcaagaaggatgtggatggggttttcctgagcaagatggagttggagggcaagctggaggctctgagagagtacctctacttcttgaagcatctgaatgaagaagagctgggccagctccaggcccaggccagcgacacgtctgtggtgctgtccatggacaacaaccgctacctggacttcagcagcatcatcactgaggtccgcgcccggtacgaggagatcgcccggagcagcaaggctgaggctgaggccttgtaccagaccaagtaccaggaacttcaggtgtctgcccagcttcatggggacaggatgcaggaaacgaaagtccagatctctcagctacaccaagagattcagaggctgcagagtcagactgagaacctcaagaagcagaacgccagcctgcaggccgccatcactgatgctgagcagcgtggggagctggccctcaaggacgctcaggccaaggtggacgagctggaggctgctctgaggatggccaagcagaacctggcccggctgctgtgcgagtaccaggagctgacgagcacgaagctttccctggatgtggagattgccacttaccgcaggctgctggagggcgaggagtgcaggatgtctggggagtgcaccagccaggtcactatctcctcggtgggaggcagcgctgtcatgtctggaggagttggtggaggcttggggagcacttgtggactcggtagtgggaaaggcagccctgggtcctgctgcaccagcattgtgactggaggctccaacatcattctgggctctgggaaggaccctgttttggattcctgctctgtgtctggctccagcgctggctccagctgccacaccatcctgaagaagacagttgagtcgagtctgaagacatccatcacctactgagcgacccagcagccacctccttcctgaacacatttggcccactccccccatcagccggctctgcaaggccaactccgtgtccgctgcccacagcccaagccagcccacagcggatgctgcaaaaatcaataaagtctcccctcctgctgttctgaatgctctaagtgcttgcacacctcacccagcaaaacaaaagctgtgtggctccccagcttcctctcctcggaaggcaattgtggcatatctgtgtccagacgtgttctattggtatctcactccacatcccagccactctatcaaggaaactaaattcatccaaggtagttcaattaaattgactttttgaaaagt

SEQ ID NO: 136 - protein, 520 aa, Homo sapiens
MSLSPCRAQRGFSARSACSARSRGRSRGGFSSRGGFSSRSLNSFGGCLEGSRGSTWGSGGRLGVRFGEWSGGPGLSLCPPGGIQEVTINQNPLTPLKIEIDPQFQVVRTQETQEIRTLNNQFASFIDKVRFLEQQNKVLETKWHLLQQQGLSGSQQGLEPVFEACLDQLRKQLEQLQGERGALDAELKACRDQEEEYKSKYEEEAHRRATLENDFVVLKKDVDGVFLSKMELEGKLEALREYLYFLKHLNEEELGQLQAQASDTSVVLSMDNNRYLDFSSIITEVRARYEEIARSSKAEAEALYQTKYQELQVSAQLHGDRMQETKVQISQLHQEIQRLQSQTENLKKQNASLQAAITDAEQRGELALKDAQAKVDELEAALRMAKQNLARLLCEYQELTSTKLSLDVEIATYRRLLEGEECRMSGECTSQVTISSVGGSAVMSGGVGGGLGSTCGLGSGKGSPGSCCTSIVTGGSNIILGSGKDPVLDSCSVSGSSAGSSCHTILKKTVESSLKTSITY

SEQ ID NO: 137 - DNA, 2109 bp, Homo sapiens
gagggaagaacacaatggatctggtgctaaaaagatgccttcttcatttggctgtgataggtgctttgctggctgtgggggctacaaaagtacccagaaaccaggactggcttggtgtctcaaggcaactcagaaccaaagcctggaacaggcagctgtatccagagtggacagaagcccagagacttgactgctggagaggtggtcaagtgtccctcaaggtcagtaatgatgggcctacactgattggtgcaaatgcctccttctctattgccttgaacttccctggaagccaaaaggtattgccagatgggcaggttatctgggtcaacaataccatcatcaatgggagccaggtgtggggaggacagccagtgtatccccaggaaactgacgatgcctgcatcttccctgatggtggaccttgcccatctggctcttggtctcagaagagaagctttgtttatgtctggaagacctggggccaatactggcaagttctagggggcccagtgtctgggctgagcattgggacaggcagggcaatgctgggcacacacaccatggaagtgactgtctaccatcgccggggatcccggagctatgtgcctcttgctcattccagctcagccttcaccattactgaccaggtgcctttctccgtgagcgtgtcccagttgcgggccttggatggagggaacaagcacttcctgagaaatcagcctctgacctttgccctccagctccatgaccccagtggctatctggctgaagctgacctctcctacacctgggactttggagacagtagtggaaccctgatctctcgggcacttgtggtcactcatacttacctggagcctggcccagtcactgcccaggtggtcctgcaggctgccattcctctcacctcctgtggctcctccccagttccaggcaccacagatgggcacaggccaactgcagaggcccctaacaccacagctggccaagtgcctactacagaagttgtgggtactacacctggtcaggcgccaactgcagagccctctggaaccacatctgtgcaggtgccaaccactgaagtcataagcactgcacctgtgcagatgccaactgcagagagcacaggtatgacacctgagaaggtgccagtttcagaggtcatgggtaccacactggcagagatgtcaactccagaggctacaggtatgacacctgcagaggtatcaattgtggtgctttctggaaccacagctgcacaggtaacaactacagagtgggtggagaccacagctagagagctacctatccctgagcctgaaggtccagatgccagctcaatcatgtctacggaaagtattacaggttccctgggccccctgctggatggtacagccaccttaaggctggtgaagagacaagtccccctggattgtgttctgtatcgatatggttccttttccgtcaccctggacattgtccagggtattgaaagtgccgagatcctgcaggctgtgccgtccggtgagggggatgcatttgagctgactgtgtcctgccaaggcgggctgcccaaggaagcctgcatggagatctcatcgccagggtgccagccccctgcccagcggctgtgccagcctgtgctacccagcccagcctgccagctggttctgcaccagatactgaagggtggctcggggacatactgcctcaatgtgtctctggctgataccaacagcctggcagtggtcagcacccagcttatcatgcctggtcaagaagcaggccttgggcaggttccgctgatcgtgggcatcttgctggtgttgatggctgtggtccttgcatctctgatatataggcgcagacttatgaagcaagacttctccgtaccccagttgccacatagcagcagtcactggctgcgtctaccccgcatcttctgctcttgtcccattggtgagaacagccccctcctcagtgggcagcaggtctgagtactctcatatgatgctgtgattttcctggagttgacagaaacacctatatttcccccagtcttccctgggagactactattaactgaaataaatactcagagcctga

SEQ ID NO: 138 - protein, 661 aa, Homo sapiens
MDLVLKRCLLHLAVIGALLAVGATKVPRNQDWLGVSRQLRTKAWNRQLYPEWTEAQRLDCWRGGQVSLKVSNDGPTLIGANASFSIALNFPGSQKVLPDGQVIWVNNTIINGSQVWGGQPVYPQETDDACIFPDGGPCPSGSWSQKRSFVYVWKTWGQYWQVLGGPVSGLSIGTGRAMLGTHTMEVTVYHRRGSRSYVPLAHSSSAFTITDQVPFSVSVSQLRALDGGNKHFLRNQPLTFALQLHDPSGYLAEADLSYTWDFGDSSGTLISRALVVTHTYLEPGPVTAQVVLQAAIPLTSCGSSPVPGTTDGHRPTAEAPNTTAGQVPTTEVVGTTPGQAPTAEPSGTTSVQVPTTEVISTAPVQMPTAESTGMTPEKVPVSEVMGTTLAEMSTPEATGMTPAEVSIVVLSGTTAAQVTTTEWVETTARELPIPEPEGPDASSIMSTESITGSLGPLLDGTATLRLVKRQVPLDCVLYRYGSFSVTLDIVQGIESAEILQAVPSGEGDAFELTVSCQGGLPKEACMEISSPGCQPPAQRLCQPVLPSPACQLVLHQILKGGSGTYCLNVSLADTNSLAVVSTQLIMPGQEAGLGQVPLIVGILLVLMAVVLASLIYRRRLMKQDFSVPQLPHSSSHWLRLPRIFCSCPIGENSPLLSGQQV

SEQ ID NO: 139 - DNA, 2288 bp, Homo sapiens
gcctgtcgcaggcgtgcagggacctggactccgcctcgtccccggggctcgggcagccgagccatggcggggaactgtggggcccgcggcgcgctgtcggcgcacacgctgctgttcgacctgccgcccgcgctgctcggagagctctgcgctgttctggacagctgcgacggcgcgctgggctggcgcggcctggcagagagactttcaagcagctggctggatgttcgtcatattgaaaagtatgtagaccaaggtaaaagtggaacaagagaattactttggtcctgggcacagaaaaacaagaccatcggtgaccttttacaggtcctccaggagatgggacatcgtcgagctattcatttaattacaaactatggagcagtgttgagtccttcagagaagagttatcaggaaggtggatttccaaatatattattcaaggaaacagccaatgtcaccgtggataatgttcttattcctgaacataatgaaaaaggagtactgcttaaatcttccatcagctttcaaaatatcatagaaggaactagaaatttccacaaagacttcctaattggagaaggagagatttttgaggtatacagagtggagattcaaaacctaacatatgctgtcaaattatttaaacaggagaaaaaaatgcagtgtaagaagcattggaagaggtttttatctgagcttgaagttttactactgtttcatcacccaaacatactagagttggctgcatattttacagagactgagaagttctgtctgatttatccatacatgagaaatggaacactttttgacagattgcagtgtgtaggtgacacggccccactcccttggcacattcgaatcggtatattaataggaatatccaaagccattcactacctgcacaacgttcaaccatgctcggtcatctgtggcagtatatcaagtgcaaacatccttttggatgatcagtttcaacccaaactaactgattttgccatggcacacttccggtcccacctagaacatcagagttgtaccataaatatgaccagcagcagcagtaaacatctgtggtacatgccagaagagtacatcagacaggggaaactttccattaaaacagatgtctacagctttggaattgtaataatggaagttctaacaggatgtagagtagtgttagatgatccaaaacatatccagctgcgggatctccttagagaattgatggagaagagaggcctggattcatgtctctcatttctagataagaaagtgcctccctgccctcggaatttctctgccaagctcttctgtttggcaggccggtgtgctgcaacgcgggcaaagttaagaccatcaatggatgaagttttaaatactcttgaaagtactcaagccagcttgtattttgctgaagatcctcccacatcactaaagtccttcaggtgtccttctcctctattcctggagaatgtaccaagtattccagtggaagatgatgaaagccagaataacaatttactaccttctgatgaaggcctgaggatagacagaatgactcagaaaactccttttgaatgcagccagtctgaggttatgtttctgagcttggacaaaaagccagagagcaagagaaatgaggaagcttgcaacatgcccagttcttcttgtgaagaaagttggttcccaaagtatatagttccatcccaggacttaaggccctataaggtaaatatagatccttcttcagaagctccagggcattcttgcaggagcaggccagtggagagcagctgttcctccaaattttcctgggatgaatatgaacagtacaaaaaagaataaattctaccagaagataaagaaaaaagcaagtattgcataggcacctgagcataggtatgaccttgggaagacattggctccataagcaatgccaagagaatgatcaatagtgagtttgggtgatgcagataaacaatctggataattccatttcttttttcccaaaccctcaaacagagtgccttaaaaaattgttttatcaggataattgtctcatgaccaaatccacgctcaattagagccattcaaaattccttaagatcatgggttctgacttcagccaaacaaaacaatcaaaacctaccaaaaagggactggattgtaatgtcctctccatcatcctcagtgtgagtcctcagagcctccatctgccaagaacattcagttggattccatcgtttggtttagcttgcttgcacgggttgtaggaaatg

SEQ ID NO: 140 - protein, 596 aa, Homo sapiens
MAGNCGARGALSAHTLLFDLPPALLGELCAVLDSCDGALGWRGLAERLSSSWLDVRHIEKYVDQGKSGTRELLWSWAQKNKTIGDLLQVLQEMGHRRAIHLITNYGAVLSPSEKSYQEGGFPNILFKETANVTVDNVLIPEHNEKGVLLKSSISFQNIIEGTRNFHKDFLIGEGEIFEVYRVEIQNLTYAVKLFKQEKKMQCKKHWKRFLSELEVLLLFHHPNILELAAYFTETEKFCLIYPYMRNGTLFDRLQCVGDTAPLPWHIRIGILIGISKAIHYLHNVQPCSVICGSISSANILLDDQFQPKLTDFAMAHFRSHLEHQSCTINMTSSSSKHLWYMPEEYIRQGKLSIKTDVYSFGIVIMEVLTGCRVVLDDPKHIQLRDLLRELMEKRGLDSCLSFLDKKVPPCPRNFSAKLFCLAGRCAATRAKLRPSMDEVLNTLESTQASLYFAEDPPTSLKSFRCPSPLFLENVPSIPVEDDESQNNNLLPSDEGLRIDRMTQKTPFECSQSEVMFLSLDKKPESKRNEEACNMPSSSCEESWFPKYIVPSQDLRPYKVNIDPSSEAPGHSCRSRPVESSCSSKFSWDEYEQYKKE

SEQ ID NO: 141 - DNA, 601 bp, Homo sapiens
ctgataaactaattgcctcacattgtcactgcaaatcgacacctattaatgggtctcacctcccaactgcttccccctctgttcttcctgctagcatgtgccggcaactttgtccacggacacaagtgcgatatcaccttacaggagatcatcaaaactttgaacagcctcacagagcagaagactctgtgcaccgagttgaccgtaacagacatctttgctgcctccaagaacacaactgagaaggaaaccttctgcagggctgcgactgtgctccggcagttctacagccaccatgagaaggacactcgctgcctgggtgcgactgcacagcagttccacaggcacaagcagctgatccgattcctgaaacggctcgacaggaacctctggggcctggcgggcttgaattcctgtcctgtgaaggaagccaaccagagtacgttggaaaacttcttggaaaggctaaagacgatcatgagagagaaatattcaaagtgttcgagctgaatattttaatttatgagtttttgatagctttattttttaagtatttatatatttataactcatcataaaataaagtatatatagaatctaa

SEQ ID NO: 142 - protein, 153 aa, Homo sapiens [sequence omitted]

SEQ ID NO: 143 - DNA, 1282 bp, Homo sapiens
aagccacccagcctatgcatccgctcctcaatcctctcctgttggcactgggcctcatggcgcttttgttgaccacggtcattgctctcacttgccttggcggctttgcctccccaggccctgtgcctccctctacagccctcagggagctcattgaggagctggtcaacatcacccagaaccagaaggctccgctctgcaatggcagcatggtatggagcatcaacctgacagctggcatgtactgtgcagccctggaatccctgatcaacgtgtcaggctgcagtgccatcgagaagacccagaggatgctgagcggattctgcccgcacaaggtctcagctgggcagttttccagcttgcatgtccgagacaccaaaatcgaggtggcccagtttgtaaaggacctgctcttacatttaaagaaactttttcgcgagggacggttcaactgaaacttcgaaagcatcattatttgcagagacaggacctgactattgaagttgcagattcatttttctttctgatgtcaaaaatgtcttgggtaggcgggaaggagggttagggaggggtaaaattccttagcttagacctcagcctgtgctgcccgtcttcagcctagccgacctcagccttccccttgcccagggctcagcctggtgggcctcctctgtccagggccctgagctcggtggacccagggatgacatgtccctacacccctcccctgccctagagcacactgtagcattacagtgggtgccccccttgccagacatgtggtgggacagggacccacttcacacacaggcaactgaggcagacagcagctcaggcacacttcttcttggtcttatttattattgtgtgttatttaaatgagtgtgtttgtcaccgttggggattggggaagactgtggctgctggcacttggagccaagggttcagagactcagggccccagcactaaagcagtggaccccaggagtccctggtaataagtactgtgtacagaattctgctacctcactggggtcctggggcctcggagcctcatccgaggcagggtcaggagaggggcagaacagccgctcctgtctgccagccagcagccagctctcagccaacgagtaatttattgtttttcctcgtatttaaatattaaatatgttagcaaagagttaatatatagaagggtaccttgaacactgggggaggggacattgaacaagttgtttcattgactatcaaactgaagccagaaataaagttggtgacagat

SEQ ID NO: 144 - protein, 132 aa, Homo sapiens
MALLLTTVIALTCLGGFASPGPVPPSTALRELIEELVNITQNQKAPLCNGSMVWSINLTAGMYCAALESLINVSGCSAIEKTQRMLSGFCPHKVSAGQFSSLHVRDTKIEVAQFVKDLLLHLKKLFREGRFN

SEQ ID NO: 145 - DNA, 4123 bp, Homo sapiens
tgcggagttttggaatagaggacaaagataagcacgcccagaatgctcatcttttcggtccgggacatgtttgcaaagatgagcattctgggcgtgcggagttttggaatagaggacaaagataagcaaattatcactttcttcagcccccttacaattttggttggacccaatggggcgggaaagacgaccatcattgaatgtctaaaatatatttgtactggagatttccctcctggaaccaaaggaaatacatttgtacacgatcccaaggttgctcaagaaacagatgtgagagcccagattcgtctgcaatttcgtgatgtcaatggagaacttatagctgtgcaaagatctatggtgtgtactcagaaaagcaaaaagacagaatttaaaaccctggaaggagtcattactagaacaaagcatggtgaaaaggtcagtctgagctctaagtgtgcagaaattgaccgagaaatgatcagttctcttggggtttccaaggctgtgctaaataatgtcattttctgtcatcaagaagattctaattggcctttaagtgagggaaaggctttgaagcaaaagtttgatgagattttttcagcaacaagatacattaaagccctagaaacacttcggcaggtacgtcagacacaaggtcagaaagtagaagaatatcaaatggaactaaaatatctgaagcaatataaggaaaaagcttgtgagattcgtgatcagattacaagtaaggaagcccagttaacatcttcaaaggaaattgtcaaatcctatgagaatgaacttgatccattgaagaatcgtctaaaagaaattgaacataatctctctaaaataatgaaacttgacaatgaaattaaagccttggatagccgaaagaagcaaatggagaaagataatagtgaactggaagagaaaatggaaaaggtttttcaagggactgatgagcaactaaatgacttatatcacaatcaccagagaacagtaagggagaaagaaaggaaattggtagactgtcatcgtgaactggaaaaactaaataaagaatctaggcttctcaatcaggaaaaatcagaactgcttgttgaacagggtcgtctacagctgcaagcagatcgccatcaagaacatatccgagctagagattcattaattcagtctttggcaacacagctagaattggatggctttgagcgtggaccattcagtgaaagacagattaaaaattttcacaaacttgtgagagagagacaagaaggggaagcaaaaactgccaaccaactgatgaatgactttgcagaaaaagagactctgaaacaaaaacagatagatgagataagagataagaaaactggactgggaagaataattgagttaaaatcagaaatcctaagtaagaagcagaatgagctgaaaaatgtgaagtatgaattacagcagttggaaggatcttcagacaggattcttgaactggaccaggagctcataaaagctgaacgtgagttaagcaaggctgagaaaaacagcaatgtagaaaccttaaaaatggaagtaataagtctccaaaatgaaaaagcagacttagacaggaccctgcgtaaacttgaccaggagatggagcagttaaaccatcatacaacaacacgtacccaaatggagatgctgaccaaagacaaagctgacaaagatgaacaaatcagaaaaataaaatctaggcacagtgatgaattaacctcactgttgggatattttcccaacaaaaaacagcttgaagactggctacatagtaaatcaaaagaaattaatcagaccagggacagacttgccaaattgaacaaggaactagcttcatctgagcagaataaaaatcatataaataatgaactagaaagaaaggaagagcagttgtccagttacgaagacaagctgtttgatgtttgtggtagccaggattttgaaagtgatttagacaggcttaaagaggaaattgaaaaatcatcaaaacagcgagccatgctggctggagccacagcagtttactcccagttcattactcagctaacagacgaaaaccagtcatgttgccccgtttgtcagagagtttttcagacagaggctgagttacaagaagccatcagtgatttgcagtctaaactgcgacttgctccagataaactcaagtcaacagaatcagagctaaaaaaaaaggaaaagcggcgtgatgaaatgctgggacttgcgcccatgaggcaaagcataattgatttgaaggagaaggaaataccagaattaagaaacaaactgcagaatgtcaatagagacatacagcgcctaaagaacgacatagaagaacaagaaacactcttgggtacaataatgcctgaagaagaaagtgccaaagtatgcctgacagatgttacaattatggagaggttccagatggaacttaaagatgttgaaagaaaaattgcacaacaagcagctaagctacaaggaatagacttagatcgaactgtccaacaagtcaaccaggagaaacaagagaaacagcacaagttagacacagtttctagtaagattgaattgaatcgtaagcttatacaggaccagcaggaacagattcaacatctaaaaagtacaacaaatgagctaaaatctgagaaacttcagatatccactaatttgcaacgtcgtcagcaactggaggagcagactgtggaattatccactgaagttcagtctttgtacagagagataaaggatgctaaagagcaggtaagccctttggaaacaacattggaaaagttccagcaagaaaaagaagaattaatcaacaaaaaaaatacaagcaacaaaatagcacaggataaactgaatgatattaaagagaaggttaaaaatattcatggctatatgaaagacattgagaatcatattcaagatgggaaagacgactatatgaagcaaaaagaaactgaacttaataaagtaatagctcaactaagtgaatgcgagaaacacaaagaaaagataaatgaagatatgagactcatgagacaagatattgatacacagaagatacaagaaaggtggctacaagataaccttactttaagaaaaagaaatgaggaactaaaagaagttgaagaagaaggaaaacaacatttgaaggaaatgggtcaaatgcaggttttgcaaatgaaaagtgaacatcagaagttggaagagaacatagacaatataaaaagaaatcataatttggcattagggcgacagaaaggttatgaagaagaaattattcattttaagaaagaacttcgagaaccacaatttcgggatgctgaggaaaagtatagagaaatgatgattgttatgaggacaacagaacttgtgaacaaggatctggatatttattataagactcttgaccaagcaataatgaaatttcacagtatgaagatggaagaaatcaataaaattatacgtgacctgtggcgaagtacctatcgtggacaagatattgaatacatagaaatacggtctgatgccgatgaaaatgtatcagcttctgataaaaggcggaattataactaccgagtggtgatgctgaagggagacacagccttggatatgcgaggacgatgcagtgctggacaaaaggtattagcctcactcatcattcgcctggccctggctgaaacgttctgcctcaactgtggcatcattgccttggatgagccaacaacaaatcttgaccgagaaaacattgaatctcttgcacatgctctggttgagataataaaaagtcgctcacagcagcgtaacttccagcttctggtaatcactcatgatgaagattttgtggagcttttaggacgttctgaatatgtggagaaattctacaggattaaaaagaacatcgatcagtgctcagagattgtgaaatgcagtgttagctccctgggattcaatgttcattaaaaatatccaagatttaaatgccatagaaatgtaggtcctcagaaagtgtataataagaaacttatttctcatatcaacttagtcaataagaaaatatattctttcaaaggaaaaaaaaaaaaaa

SEQ ID NO: 146 - protein, 1318 aa, Homo sapiens
MLIFSVRDMFAKMSILGVRSFGIEDKDKQIITFFSPLTILVGPNGAGKTTIIECLKYICTGDFPPGTKGNTFVHDPKVAQETDVRAQIRLQFRDVNGELIAVQRSMVCTQKSKKTEFKTLEGVITRTKHGEKVSLSSKCAEIDREMISSLGVSKAVLNNVIFCHQEDSNWPLSEGKALKQKFDEIFSATRYIKALETLRQVRQTQGQKVEEYQMELKYLKQYKEKACEIRDQITSKEAQLTSSKEIVKSYENELDPLKNRLKEIEHNLSKIMKLDNEIKALDSRKKQMEKDNSELEEKMEKVFQGTDEQLNDLYHNHQRTVREKERKLVDCHRELEKLNKESRLLNQEKSELLVEQGRLQLQADRHQEHIRARDSLIQSLATQLELDGFERGPFSERQIKNFHKLVRERQEGEAKTANQLMNDFAEKETLKQKQIDEIRDKKTGLGRIIELKSEILSKKQNELKNVKYELQQLEGSSDRILELDQELIKAERELSKAEKNSNVETLKMEVISLQNEKADLDRTLRKLDQEMEQLNHHTTTRTQMEMLTKDKADKDEQIRKIKSRHSDELTSLLGYFPNKKQLEDWLHSKSKEINQTRDRLAKLNKELASSEQNKNHINNELERKEEQLSSYEDKLFDVCGSQDFESDLDRLKEEIEKSSKQRAMLAGATAVYSQFITQLTDENQSCCPVCQRVFQTEAELQEAISDLQSKLRLAPDKLKSTESELKKKEKRRDEMLGLAPMRQSIIDLKEKEIPELRNKLQNVNRDIQRLKNDIEEQETLLGTIMPEEESAKVCLTDVTIMERFQMELKDVERKIAQQAAKLQGIDLDRTVQQVNQEKQEKQHKLDTVSSKIELNRKLIQDQQEQIQHLKSTTNELKSEKLQISTNLQRRQQLEEQTVELSTEVQSLYREIKDAKEQVSPLETTLEKFQQEKEELINKKNTSNKIAQDKLNDIKEKVKNIHGYMKDIENHIQDGKDDYMKQKETELNKVIAQLSECEKHKEKINEDMRLMRQDIDTQKIQERWLQDNLTLRKRNEELKEVEEEGKQHLKEMGQMQVLQMKSEHQKLEENIDNIKRNHNLALGRQKGYEEEIIHFKKELREPQFRDAEEKYREMMIVMRTTELVNKDLDIYYKTLDQAIMKFHSMKMEEINKIIRDLWRSTYRGQDIEYIEIRSDADENVSASDKRRNYNYRVVMLKGDTALDMRGRCSAGQKVLASLIIRLALAETFCLNCGIIALDEPTTNLDRENIESLAHALVEIIKSRSQQRNFQLLVITHDEDFVELLGRSEYVEKFYRIKKNIDQCSEIVKCSVSSLGFNVH

SEQ ID NO: 147 - DNA, 816 bp, Homo sapiens
atgcactttctttgccaaaggcaaacgcagaacgtttcagagccatgaggatgcttctgcatttgagtttgctagctcttggagctgcctacgtgtatgccatccccacagaaattcccacaagtgcattggtgaaagagaccttggcactgctttctactcatcgaactctgctgatagccaatgagactctgaggattcctgttcctgtacataaaaatcaccaactgtgcactgaagaaatctttcagggaataggcacactggagagtcaaactgtgcaagggggtactgtggaaagactattcaaaaacttgtccttaataaagaaatacattgacggccaaaaaaaaaagtgtggagaagaaagacggagagtaaaccaattcctagactacctgcaagagtttcttggtgtaatgaacaccgagtggataatagaaagttgagactaaactggtttgttgcagccaaagattttggaggagaaggacattttactgcagtgagaatgagggccaagaaagagtcaggccttaattttcaatataatttaacttcagagggaaagtaaatatttcaggcatactgacactttgccagaaagcataaaattcttaaaatatatttcagatatcagaatcattgaagtattttcctccaggcaaaattgatatacttttttcttatttaacttaacattctgtaaaatgtctgttaacttaatagtatttatgaaatggttaagaatttggtaaattagtatttatttaatgttatgttgtgttctaataaaacaaaaatagacaactgttc

SEQ ID NO: 148 - protein, 134 aa, Homo sapiens
MRMLLHLSLLALGAAYVYAIPTEIPTSALVKETLALLSTHRTLLIANETLRIPVPVHKNHQLCTEEIFQGIGTLESQTVQGGTVERLFKNLSLIKKYIDGQKKKCGEERRRVNQFLDYLQEFLGVMNTEWIIES

SEQ ID NO: 149 - DNA, 2035 bp, Homo sapiens
cgagccccgccgaaccgaggccacccggagccgtgcccagtccacgccggccgtgcccggcggccttaagaaccaggcaacctctgccttcttccctcttccactcggagtcgcgctccgcgcgccctcactgcagcccctgcgtcgccgggaccctcgcgcgcgaccagccgaatcgctcctgcagcagagccaacatgcccatcactcggatgcgcatgagaccctggctagagatgcagattaattccaaccaaatcccggggctcatctggattaataaagaggagatgatcttccagatcccatggaagcatgctgccaagcatggctgggacatcaacaaggatgcctgtttgttccggagctgggccattcacacaggccgatacaaagcaggggaaaaggagccagatcccaagacgtggaaggccaactttcgctgtgccatgaactccctgccagatatcgaggaggtgaaagaccagagcaggaacaagggcagctcagctgtgcgagtgtaccggatgcttccacctctcaccaagaaccagagaaaagaaagaaagtcgaagtccagccgagatgctaagagcaaggccaagaggaagtcatgtggggattccagccctgataccttctctgatggactcagcagctccactctgcctgatgaccacagcagctacacagttccaggctacatgcaggacttggaggtggagcaggccctgactccagcactgtcgccatgtgctgtcagcagcactctccccgactggcacatcccagtggaagttgtgccggacagcaccagtgatctgtacaacttccaggtgtcacccatgccctccacctctgaagctacaacagatgaggatgaggaagggaaattacctgaggacatcatgaagctcttggagcagtcggagtggcagccaacaaacgtggatgggaaggggtacctactcaatgaacctggagtccagcccacctctgtctatggagactttagctgtaaggaggagccagaaattgacagcccagggggggatattgggctgagtctacagcgtgtcttcacagatctgaagaacatggatgccacctggctggacagcctgctgaccccagtccggttgccctccatccaggccattccctgtgcaccgtagcagggcccctgggcccctcttattcctctaggcaagcaggacctggcatcatggtggatatggtgcagagaagctggacttctgtgggcccctcaacagccaagtgtgaccccactgccaagtggggatgggcctccctccttgggtcattgacctctcagggcctggcaggccagtgtctgggtttttcttgtggtgtaaagctggccctgcctcctgggaagatgaggttctgagaccagtgtatcaggtcagggacttggacaggagtcagtgtctggctttttcctctgagcccagctgcctggagagggtctcgctgtcactggctggctcctaggggaacagaccagtgaccccagaaaagcataacaccaatcccagggctggctctgcactaagcgaaaattgcactaaatgaatctcgttccaaagaactaccccttttcagctgagccctggggactgttccaaagccagtgaatgtgaaggaaactcccctccttcggggcaatgctccctcagcctcagaggagctctaccctgctccctgctttggctgaggggcttgggaaaaaaacttggcactttttcgtgtggatcttgccacatttctgatcagaggtgtacactaacatttcccccgagctcttggcctttgcatttatttatacagtgccttgctcggggcccaccaccccctcaagccccagcagccctcaacaggcccagggagggaagtgtgagcgccttggtatgacttaaaattggaaatgtcatctaaccattaagtcatgtgtgaacacataaggacgtgtgtaaatatgtacatttgtctttttataaaaagtaaaattgtt

SEQ ID NO: 150 - protein, 325 aa, Homo sapiens
MPITRMRMRPWLEMQINSNQIPGLIWINKEEMIFQIPWKHAAKHGWDINKDACLFRSWAIHTGRYKAGEKEPDPKTWKANFRCAMNSLPDIEEVKDQSRNKGSSAVRVYRMLPPLTKNQRKERKSKSSRDAKSKAKRKSCGDSSPDTFSDGLSSSTLPDDHSSYTVPGYMQDLEVEQALTPALSPCAVSSTLPDWHIPVEVVPDSTSDLYNFQVSPMPSTSEATTDEDEEGKLPEDIMKLLEQSEWQPTNVDGKGYLLNEPGVQPTSVYGDFSCKEEPEIDSPGGDIGLSLQRVFTDLKNMDATWLDSLLTPVRLPSIQAIPCAP

SEQ ID NO: 151 - DNA, 2256 bp, Homo sapiens
tcagagtccggctcaggctccggctgcggctccagcccgcgatgccccattccgtgaccctgcgcgggccttcgccctggggcttccgcctggtgggcggccgggacttcagcgcgcccctcaccatctcacgggtccatgctggcagcaaggctgcattggctgccctgtgcccaggagacctgatccaggccatcaatggtgagagcacagagctcatgacacacctggaggcacagaaccgcatcaagggctgccacgatcacctcacactgtctgtgagcaggcctgagggcaggagctggcccagtgcccctgatgacagcaaggctcaggcacacaggatccacatcgatcctgagatccaggacggcagcccaacaaccagcaggcggccctcaggcaccgggactgggccagaagatggcagaccaagcctgggatctccatatggacaaccccctcgctttccagtccctcacaatggcagcagcgaggccaccctgccagcccagatgagcaccctgcatgtgtctccaccccccagcgctgacccagccagaggcctcccgcggagccgggactgcagagtcgacctgggctccgaggtgtacaggatgctgcgggagccagccgagcccgtggccgcggagcccaagcagtcaggctccttccgctacttgcagggcatgctagaggccggcgagggcggggattggcccgggcctggcggcccccggaacctcaagcccacggccagcaagctgggcgctccgctgagcggcctgcaggggctgcccgagtgcacgcgctgcggccacggcatcgtgggcaccatcgtcaaggcacgggacaagctctaccatcccgagtgcttcatgtgcagtgactgcggcctgaacctcaagcagcgtggttacttctttctggacgagcggctctactgtgagagccacgccaaggcgcgcgtgaagccgcccgagggctacgacgtggtggcggtgtaccccaatgccaaggtggaactcgtctgagctgggaccctgctcccacgcctgcttcttaaggtccctgctcggccggtgtaaatatgtttcaccctgtccctctaataaagctcctctgctccaccttgaacctgtcacctggcctgccaccctcctgcgcaggccatgcatggctcccgagtacagtagtatctgcttaggtgccaggcatgtcctaggctctgggtgcagtagtgagcaggacgggtaccatgctgccctgaaggggccacagcctgggtggaaggcagacctgaatcacaacgggccagctctagtaatacgaaggtgaggtctgggatgctgcgtgcggcgcgacgacaggaggtatgacctgggtggggtcagggaaagtcttagctgagaactaagagatgagggaggcacaaactctgcacgggggaactgtgtgtgcaaaggtgagctgggggcgagaaaggcctctgtggccgtcatcggcactagcgggttgggggtggtggtggggtgctggcagcctcaggagcgatcgctcccctggagagggtgattgagtgtggagatcaccggggccgccgcgggccgtctgcacttctgttccaggtttttctggcattttctgttccaggtttcttccacccacgagcactttattctcctccgagacccccttttcttccccttcctctctcccaccagggggcgcgcttaaatttccagacagagaccagaaggaaggtttagaaagaaaagaacacttgcccagggcagctttgccctccaagaggctccctcctgtctctaagtcaattccacccctcctcgaagtcccggcttccacccctctcctcagagtcccggcgtttacctcgtggtgtgtttgccttgggcctttcatgccccggctgcacacatcgtctgtgaattgtggctgttcactcccgaggatgtgtcctagactccgggtcgcgtggatctaccctctagtttacttgctcgggagaagaaactgactcgttttatttagtgcctatttagcgagcccagagtaacgtacatttgtgctgttttcaattttgtgctatcgcaaatcacaaaaaaactgttatcaattcacattcatcatcagcacgagacccatttccttgtgctcctgccagctcaggatattatgtttcttttttcatttttgccagtctgttaagtaaaatgtcatatgcgtttgttttaa

SEQ ID NO: 152 - protein, 330 aa, Homo sapiens
MPHSVTLRGPSPWGFRLVGGRDFSAPLTISRVHAGSKAALAALCPGDLIQAINGESTELMTHLEAQNRIKGCHDHLTLSVSRPEGRSWPSAPDDSKAQAHRIHIDPEIQDGSPTTSRRPSGTGTGPEDGRPSLGSPYGQPPRFPVPHNGSSEATLPAQMSTLHVSPPPSADPARGLPRSRDCRVDLGSEVYRMLREPAEPVAAEPKQSGSFRYLQGMLEAGEGGDWPGPGGPRNLKPTASKLGAPLSGLQGLPECTRCGHGIVGTIVKARDKLYHPECFMCSDCGLNLKQRGYFFLDERLYCESHAKARVKPPEGYDVVAVYPNAKVELV

SEQ ID NO: 153 - DNA, 778 bp, Homo sapiens
aggaaaggctaaagttctctggaggatgtggctgcagagcctgctgctcttgggcactgtggcctgcagcatctctgcacccgcccgctcgcccagccccagcacgcagccctgggagcatgtgaatgccatccaggaggcccggcgtctcctgaacctgagtagagacactgctgctgagatgaatgaaacagtagaagtcatctcagaaatgtttgacctccaggagccgacctgcctacagacccgcctggagctgtacaagcagggcctgcggggcagcctcaccaagctcaagggccccttgaccatgatggccagccactacaagcagcactgccctccaaccccggaaacttcctgtgcaatccagactatcacctttgaaagtttcaaagagaacctgaaggactttctgcttgtcatcccctttgactgctgggagccagtccaggagtgagaccggccagatgaggctggccaagccggggagctgctctctcatgaaacaagagctagaaactcaggatggtcatcttggagggaccaaggggtgggccacagccatggtgggagtggcctggacctgccctgggccacactgaccctgatacaggcatggcagaagaatgggaatattttatactgacagaaatcagtaatatttatatatttatatttttaaaatatttatttatttatttatttaagttcatattccatatttattcaagatgttttaccgtaataattattattaaaaatatgcttctactta

SEQ ID NO: 154 - protein, 144 aa, Homo sapiens
MWLQSLLLLGTVACSISAPARSPSPSTQPWEHVNAIQEARRLLNLSRDTAAEMNETVEVISEMFDLQEPTCLQTRLELYKQGLRGSLTKLKGPLTMMASHYKQHCPPTPETSCAIQTITFESFKENLKDFLLVIPFDCWEPVQE

SEQ ID NO: 155 - DNA, 985 bp, Homo sapiens
cccggggttgtgggcaccttgctgctgcacatataaggcgggaggttgttgccaactcttcagagccccacgaaggaccagaacaagacagagtgcctcctgccgatccaaacatgagccgcctgcccgtcctgctcctgctccaactcctggtccgccccggactccaagctcccatgacccagacaacgtccttgaagacaagctgggttaactgctctaacatgatcgatgaaattataacacacttaaagcagccacctttgcctttgctggacttcaacaacctcaatggggaagaccaagacattctgatggaaaataaccttcgaaggccaaacctggaggcattcaacagggctgtcaagagtttacagaacgcatcagcaattgagagcattcttaaaaatctcctgccatgtctgcccctggccacggccgcacccacgcgacatccaatccatatcaaggacggtgactggaatgaattccggaggaaactgacgttctatctgaaaacccttgagaatgcgcaggctcaacagacgactttgagcctcgcgatcttttgagtccaacgtccagctcgttctctgggccttctcaccacagagcctcgggacatcaaaaacagcagaacttctgaaacctctgggtcatctctcacacattccaggaccagaagcatttcaccttttcctgcggcatcagatgaattgttaattatctaatttctgaaatgtgcagctcccatttggccttgtgcggttgtgttctcatttttatcccattgagactatttatttatgtatgtatgtatttatttatttattgcctggagtgtgaactgtatttattttagcagaggagccatgtcctgctgcttctgcaaaaaactcagagtggggtggggagcatgttcatttgtacctcgagttttaaactggttcctagggatgtgtgagaataaactagactctgaaca

SEQ ID NO: 156 - protein, 152 aa, Homo sapiens
MSRLPVLLLLQLLVRPGLQAPMTQTTSLKTSWVNCSNMIDEIITHLKQPPLPLLDFNNLNGEDQDILMENNLRRPNLEAFNRAVKSLQNASAIESILKNLLPCLPLATAAPTRHPIHIKDGDWNEFRRKLTFYLKTLENAQAQQTTLSLAIF

SEQ ID NO: 157 - DNA, 1821 bp, Homo sapiens
acaaggaggcaggcaagacagcaaggcatagagacaacatagagctaagtaaagccagtggaaatgaagagtcttccaatcctactgttgctgtgcgtggcagtttgctcagcctatccattggatggagctgcaaggggtgaggacaccagcatgaaccttgttcagaaatatctagaaaactactacgacctcaaaaaagatgtgaaacagtttgttaggagaaaggacagtggtcctgttgttaaaaaaatccgagaaatgcagaagttccttggattggaggtgacggggaagctggactccgacactctggaggtgatgcgcaagcccaggtgtggagttcctgatgttggtcacttcagaacctttcctggcatcccgaagtggaggaaaacccaccttacatacaggattgtgaattatacaccagatttgccaaaagatgctgttgattctgctgttgagaaagctctgaaagtctgggaagaggtgactccactcacattctccaggctgtatgaaggagaggctgatataatgatctcttttgcagttagagaacatggagacttttacccttttgatggacctggaaatgttttggcccatgcctatgcccctgggccagggattaatggagatgcccactttgatgatgatgaacaatggacaaaggatacaacagggaccaatttatttctcgttgctgctcatgaaattggccactccctgggtctctttcactcagccaacactgaagctttgatgtacccactctatcactcactcacagacctgactcggttccgcctgtctcaagatgatataaatggcattcagtccctctatggacctccccctgactcccctgagacccccctggtacccacggaacctgtccctccagaacctgggacgccagccaactgtgatcctgctttgtcctttgatgctgtcagcactctgaggggagaaatcctgatctttaaagacaggcacttttggcgcaaatccctcaggaagcttgaacctgaattgcatttgatctcttcattttggccatctcttccttcaggcgtggatgccgcatatgaagttactagcaaggacctcgttttcatttttaaaggaaatcaattctgggccatcagaggaaatgaggtacgagctggatacccaagaggcatccacaccctaggtttccctccaaccgtgaggaaaatcgatgcagccatttctgataaggaaaagaacaaaacatatttctttgtagaggacaaatactggagatttgatgagaagagaaattccatggagccaggctttcccaagcaaatagctgaagactttccagggattgactcaaagattgatgctgtttttgaagaatttgggttcttttatttctttactggatcttcacagttggagtttgacccaaatgcaaagaaagtgacacacactttgaagagtaacagctggcttaattgttgaaagagatatgtagaaggcacaatatgggcactttaaatgaagctaataattcttcacctaagtctctgtgaattgaaatgttcgttttctcctgcctgtgctgtgactcgagtcacactcaagggaacttgagcgtgaatctgtatcttgccggtcatttttatgttattacagggcattcaaatgggctgctgcttagcttgcaccttgtcacatagagtgatctttcccaagagaaggggaagcactcgtgtgcaacagacaagtgactgtatctgtgtagactatttgcttatttaataaagacgatttgtcagttgtttt

SEQ ID NO: 158 - protein, 477 aa, Homo sapiens
MKSLPILLLLCVAVCSAYPLDGAARGEDTSMNLVQKYLENYYDLKKDVKQFVRRKDSGPVVKKIREMQKFLGLEVTGKLDSDTLEVMRKPRCGVPDVGHFRTFPGIPKWRKTHLTYRIVNYTPDLPKDAVDSAVEKALKVWEEVTPLTFSRLYEGEADIMISFAVREHGDFYPFDGPGNVLAHAYAPGPGINGDAHFDDDEQWTKDTTGTNLFLVAAHEIGHSLGLFHSANTEALMYPLYHSLTDLTRFRLSQDDINGIQSLYGPPPDSPETPLVPTEPVPPEPGTPANCDPALSFDAVSTLRGEILIFKDRHFWRKSLRKLEPELHLISSFWPSLPSGVDAAYEVTSKDLVFIFKGNQFWAIRGNEVRAGYPRGIHTLGFPPTVRKIDAAISDKEKNKTYFFVEDKYWRFDEKRNSMEPGFPKQIAEDFPGIDSKIDAVFEEFGFFYFFTGSSQLEFDPNAKKVTHTLKSNSWLNC

SEQ ID NO: 159 - DNA, 1627 bp, Homo sapiens
gaagaaaccaccggaaggaaccatctcactgtgtgtaaacatgacttccaagctggccgtggctctcttggcagccttcctgatttctgcagctctgtgtgaaggtgcagttttgccaaggagtgctaaagaacttagatgtcagtgcataaagacatactccaaacctttccaccccaaatttatcaaagaactgagagtgattgagagtggaccacactgcgccaacacagaaattattgtaaagctttctgatggaagagagctctgtctggaccccaaggaaaactgggtgcagagggttgtggagaagtttttgaagagggctgagaattcataaaaaaattcattctctgtggtatccaagaatcagtgaagatgccagtgaaacttcaagcaaatctacttcaacacttcatgtattgtgtgggtctgttgtagggttgccagatgcaatacaagattcctggttaaatttgaatttcagtaaacaatgaatagtttttcattgtaccatgaaatatccagaacatacttatatgtaaagtattatttatttgaatctacaaaaaacaacaaataatttttaaatataaggattttcctagatattgcacgggagaatatacaaatagcaaaattgaggccaagggccaagagaatatccgaactttaatttcaggaattgaatgggtttgctagaatgtgatatttgaagcatcacataaaaatgatgggacaataaattttgccataaagtcaaatttagctggaaatcctggatttttttctgttaaatctggcaaccctagtctgctagccaggatccacaagtccttgttccactgtgccttggtttctcctttatttctaagtggaaaaagtattagccaccatcttacctcacagtgatgttgtgaggacatgtggaagcactttaagttttttcatcataacataaattattttcaagtgtaacttattaacctatttattatttatgtatttatttaagcatcaaatatttgtgcaagaatttggaaaaatagaagatgaatcattgattgaatagttataaagatgttatagtaaatttattttattttagatattaaatgatgttttattagataaatttcaatcagggtttttagattaaacaaacaaacaattgggtacccagttaaattttcatttcagatatacaacaaataattttttagtataagtacattattgtttatctgaaattttaattgaactaacaatcctagtttgatactcccagtcttgtcattgccagctgtgttggtagtgctgtgttgaattacggaataatgagttagaactattaaaacagccaaaactccacagtcaatattagtaatttcttgctggttgaaacttgtttattatgtacaaatagattcttataatattatttaaatgactgcatttttaaatacaaggctttatatttttaactttaagatgtttttatgtgctctccaaattttttttactgtttctgattgtatggaaatataaaagtaaatatgaaacatttaaaatataatttgttgtcaaagtaaaaaaaaaaaaaaaaaaaaaaaaaaaaaaaaaaaaa

SEQ ID NO: 160 - protein, 99 aa, Homo sapiens
MTSKLAVALLAAFLISAALCEGAVLPRSAKELRCQCIKTYSKPFHPKFIKELRVIESGPHCANTEIIVKLSDGRELCLDPKENWVQRVVEKFLKRAENS

SEQ ID NO: 161 - DNA, 3934 bp, Homo sapiens
cctctcaccctttagcccagaactgctttgaatacaccaattgctgtggggcggctcgaggaagagaagacaccagtgcctcagaaactgctcggtcagacggtgatagcgagccacgcattcacagggccactgctgctcacagaagcagtgaggatgatgccaggatgatgtctgcctcgcgcctggctgggactctgatcccagccatggccttcctctcctgcgtgagaccagaaagctgggagccctgcgtggagacttggccctaaaccacacagaagagctggcatgaaacccagagctttcagactccggagcctcagcccttcaccccgattccattgcttcttgctaaatgctgccgttttatcacggaggtggttcctaatattacttatcaatgcatggagctgaatttctacaaaatccccgacaacctccccttctcaaccaagaacctggacctgagctttaatcccctgaggcatttaggcagctatagcttcttcagtttcccagaactgcaggtgctggatttatccaggtgtgaaatccagacaattgaagatggggcatatcagagcctaagccacctctctaccttaatattgacaggaaaccccatccagagtttagccctgggagccttttctggactatcaagtttacagaagctggtggctgtggagacaaatctagcatctctagagaacttccccattggacatctcaaaactttgaaagaacttaatgtggctcacaatcttatccaatctttcaaattacctgagtatttttctaatctgaccaatctagagcacttggacctttccagcaacaagattcaaagtatttattgcacagacttgcgggttctacatcaaatgcccctactcaatctctctttagacctgtccctgaaccctatgaactttatccaaccaggtgcatttaaagaaattaggcttcataagctgactttaagaaataattttgatagtttaaatgtaatgaaaacttgtattcaaggtctggctggtttagaagtccatcgtttggttctgggagaatttagaaatgaaggaaacttggaaaagtttgacaaatctgctctagagggcctgtgcaatttgaccattgaagaattccgattagcatacttagactactacctcgatgatattattgacttatttaattgtttgacaaatgtttcttcattttccctggtgagtgtgactattgaaagggtaaaagacttttcttataatttcggatggcaacatttagaattagttaactgtaaatttggacagtttcccacattgaaactcaaatctctcaaaaggcttactttcacttccaacaaaggtgggaatgctttttcagaagttgatctaccaagccttgagtttctagatctcagtagaaatggcttgagtttcaaaggttgctgttctcaaagtgattttgggacaaccagcctaaagtatttagatctgagcttcaatggtgttattaccatgagttcaaacttcttgggcttagaacaactagaacatctggatttccagcattccaatttgaaacaaatgagtgagttttcagtattcctatcactcagaaacctcatttaccttgacatttctcatactcacaccagagttgctttcaatggcatcttcaatggcttgtccagtctcgaagtcttgaaaatggctggcaattctttccaggaaaacttccttccagatatcttcacagagctgagaaacttgaccttcctggacctctctcagtgtcaactggagcagttgtctccaacagcatttaactcactctccagtcttcaggtactaaatatgagccacaacaacttcttttcattggatacgtttccttataagtgtctgaactccctccaggttcttgattacagtctcaatcacataatgacttccaaaaaacaggaactacagcattttccaagtagtctagctttcttaaatcttactcagaatgactttgcttgtacttgtgaacaccagagtttcctgcaatggatcaaggaccagaggcagctcttggtggaagttgaacgaatggaatgtgcaacaccttcagataagcagggcatgcctgtgctgagtttgaatatcacctgtcagatgaataagaccatcattggtgtgtcggtcctcagtgtgcttgtagtatctgttgtagcagttctggtctataagttctattttcacctgatgcttcttgctggctgcataaagtatggtagaggtgaaaacatctatgatgcctttgttatctactcaagccaggatgaggactgggtaaggaatgagctagtaaagaatttagaagaaggggtgcctccatttcagctctgccttcactacagagactttattcccggtgtggccattgctgccaacatcatccatgaaggtttccataaaagccgaaaggtgattgttgtggtgtcccagcacttcatccagagccgctggtgtatctttgaatatgagattgctcagacctggcagtttctgagcagtcgtgctggtatcatcttcattgtcctgcagaaggtggagaagaccctgctcaggcagcaggtggagctgtaccgccttctcagcaggaacacttacctggagtgggaggacagtgtcctggggcggcacatcttctggagacgactcagaaaagccctgctggatggtaaatcatggaatccagaaggaacagtgggtacaggatgcaattggcaggaagcaacatctatctgaagaggaaaaataaaaacctcctgaggcatttcttgcccagctgggtccaacacttgttcagttaataagtattaaatgctgccacatgtcaggccttatgctaagggtgagtaattccatggtgcactagatatgcagggctgctaatctcaaggagcttccagtgcagagggaataaatgctagactaaaatacagagtcttccaggtgggcatttcaaccaactcagtcaaggaacccatgacaaagaaagtcatttcaactcttacctcatcaagttgaataaagacagagaaaacagaaagagacattgttcttttcctgagtcttttgaatggaaattgtattatgttatagccatcataaaaccattttggtagttttgactgaactgggtgttcactttttcctttttgattgaatacaatttaaattctacttgatgactgcagtcgtcaaggggctcctgatgcaagatgccccttccattttaagtctgtctccttacagaggttaaagtctagtggctaattcctaaggaaacctgattaacacatgctcacaaccatcctggtcattctcgagcatgttctattttttaactaatcacccctgatatatttttatttttatatatccagttttcatttttttacgtcttgcctataagctaatatcataaataaggttgtttaagacgtgcttcaaatatccatattaaccactatttttcaaggaagtatggaaaagtacactctgtcactttgtcactcgatgtcattccaaagttattgcctactaagtaatgactgtcatgaaagcagcattgaaataatttgtttaaagggggcactcttttaaacgggaagaaaatttccgcttcctggtcttatcatggacaatttgggctagaggcaggaaggaagtgggatgacctcaggaggtcaccttttcttgattccagaaacatatgggctgataaacccggggtgacctcatgaaatgagttgcagcagaagtttatttttttcagaacaagtgatgtttgatggacctctgaatctctttagggagacacagatggctgggatccctcccctgtacccttctcactgccaggagaacta

SEQ ID NO: 162 - protein, 799 aa, Homo sapiens
MELNFYKIPDNLPFSTKNLDLSFNPLRHLGSYSFFSFPELQVLDLSRCEIQTIEDGAYQSLSHLSTLILTGNPIQSLALGAFSGLSSLQKLVAVETNLASLENFPIGHLKTLKELNVAHNLIQSFKLPEYFSNLTNLEHLDLSSNKIQSIYCTDLRVLHQMPLLNLSLDLSLNPMNFIQPGAFKEIRLHKLTLRNNFDSLNVMKTCIQGLAGLEVHRLVLGEFRNEGNLEKFDKSALEGLCNLTIEEFRLAYLDYYLDDIIDLFNCLTNVSSFSLVSVTIERVKDFSYNFGWQHLELVNCKFGQFPTLKLKSLKRLTFTSNKGGNAFSEVDLPSLEFLDLSRNGLSFKGCCSQSDFGTTSLKYLDLSFNGVITMSSNFLGLEQLEHLDFQHSNLKQMSEFSVFLSLRNLIYLDISHTHTRVAFNGIFNGLSSLEVLKMAGNSFQENFLPDIFTELRNLTFLDLSQCQLEQLSPTAFNSLSSLQVLNMSHNNFFSLDTFPYKCLNSLQVLDYSLNHIMTSKKQELQHFPSSLAFLNLTQNDFACTCEHQSFLQWIKDQRQLLVEVERMECATPSDKQGMPVLSLNITCQMNKTIIGVSVLSVLVVSVVAVLVYKFYFHLMLLAGCIKYGRGENIYDAFVIYSSQDEDWVRNELVKNLEEGVPPFQLCLHYRDFIPGVAIAANIIHEGFHKSRKVIVVVSQHFIQSRWCIFEYEIAQTWQFLSSRAGIIFIVLQKVEKTLLRQQVELYRLLSRNTYLEWEDSVLGRHIFWRRLRKALLDGKSWNPEGTVGTGCNWQEATSI

SEQ ID NO: 163 - DNA, 1182 bp, Homo sapiens
tagttctccctgagtgagacttgcctgcttctctggcccctggtcctgtcctgttctccagcatggtgtgtctgaagctccctggaggctcctgcatgacagcgctgacagtgacactgatggtgctgagctccccactggctttggctggggacacccgaccacgtttcttgtggcagcttaagtttgaatgtcatttcttcaatgggacggagcgggtgcggttgctggaaagatgcatctataaccaagaggagtccgtgcgcttcgacagcgacgtgggggagtaccgggcggtgacggagctggggcggcctgatgccgagtactggaacagccagaaggacctcctggagcagaggcgggccgcggtggacacctactgcagacacaactacggggttggtgagagcttcacagtgcagcggcgagttgagcctaaggtgactgtgtatccttcaaagacccagcccctgcagcaccacaacctcctggtctgctctgtgagtggtttctatccaggcagcattgaagtcaggtggttccggaacggccaggaagagaaggctggggtggtgtccacaggcctgatccagaatggagattggaccttccagaccctggtgatgctggaaacagttcctcggagtggagaggtttacacctgccaagtggagcacccaagtgtgacgagccctctcacagtggaatggagagcacggtctgaatctgcacagagcaagatgctgagtggagtcgggggcttcgtgctgggcctgctcttccttggggccgggctgttcatctacttcaggaatcagaaaggacactctggacttcagccaacaggattcctgagctgaaatgcagatgaccacattcaaggaagaaccttctgtcccagctttgcagaatgaaaagctttcctgcttggcagttattcttccacaagagagggctttctcaggacctggttgctactggttcggcaactgcagaaaatgtcctcccttgtggcttcctcagctcctgcccttggcctgaagtcccagcattgatgacagcgcctcatcttcaacttttgtgctcccctttgcctaaaccgtatggcctcccgtgcatctgtactcaccctgtacgacaaacacattacattattaaatgtttctcaaagatggagtt

SEQ ID NO: 164 - protein, 266 aa, Homo sapiens
MVCLKLPGGSCMTALTVTLMVLSSPLALAGDTRPRFLWQLKFECHFFNGTERVRLLERCIYNQEESVRFDSDVGEYRAVTELGRPDAEYWNSQKDLLEQRRAAVDTYCRHNYGVGESFTVQRRVEPKVTVYPSKTQPLQHHNLLVCSVSGFYPGSIEVRWFRNGQEEKAGVVSTGLIQNGDWTFQTLVMLETVPRSGEVYTCQVEHPSVTSPLTVEWRARSESAQSKMLSGVGGFVLGLLFLGAGLFIYFRNQKGHSGLQPTGFLS

SEQ ID NO: 165 - DNA, 681 bp, Homo sapiens
  modified_base (67)..(67): a, c, t, g, unknown or other
acgtcactgtcttgaagcagcagtagcctgggaagtgaggcaggaggaattgagaggcaggaagggngctggagacacagctgagcctggaaatgagagtgggcatcgccgtggtcatcatgactcctctgcggcgtggtcaccatgttggttcactgtgttgggctcttattgacgggtctcctgctaggcctgaccttgggtgccggagccctgctggcttctgagcctatctaccaaccaccttcagcctgggtgccagctggggggctggtggggctggcgctgctgggagccctgctcacacttcggtggccacgtccattcacagttctgggcacaaccctgctgggttctgcagtgcttgtggcctgtgttgactacttcctggaggggctggcactggggagttggctgggccaacgcctgcagacacttccagccttgccttctctctgctgatatagctgggtcttactggggatctggccagccttgggggcccttggagccctggcccagtggaagctcgtgcctgaggaacatggaggccacgctaatgggtctgttcctggtttcccagatgcataaaggaagacatatccctcccctgggcagcaaggctacaatgggagggagggagaacatgggagcatgtgaataaaatggcattaaatactg

SEQ ID NO: 166 - protein, 105 aa, Homo sapiens
MLVHCVGLLLTGLLLGLTLGAGALLASEPIYQPPSAWVPAGGLVGLALLGALLTLRWPRPFTVLGTTLLGSAVLVACVDYFLEGLALGSWLGQRLQTLPALPSLC

SEQ ID NO: 167 - DNA, 946 bp, Homo sapiens
ccgggtcgactactactactactaaattcgcggccgcgtcgaccgccccttggcttctgcactgatggtgggtggatgagtaatgcatccaggaagcctggaggcctgtggtttccgcacccgctgccacccccgcccctagcgtggacatttatcctctagcgctcaggccctgccgccatcgccgcagatccagcgcccagagagacaccagagaacccaccatggccccctttgagcccctggcttctggcatcctgttgttgctgtggctgatagcccccagcagggcctgcacctgtgtcccaccccacccacagacggccttctgcaattccgacctcgtcatcagggccaagttcgtggggacaccagaagtcaaccagaccaccttataccagcgttatgagatcaagatgaccaagatgtataaagggttccaagccttaggggatgccgctgacatccggttcgtctacacccccgccatggagagtgtctgcggatacttccacaggtcccacaaccgcagcgaggagtttctcattgctggaaaactgcaggatggactcttgcacatcactacctgcagtttcgtggctccctggaacagcctgagcttagctcagcgccggggcttcaccaagacctacactgttggctgtgaggaatgcacagtgtttccctgtttatccatcccctgcaaactgcagagtggcactcattgcttgtggacggaccagctcctccaaggctctgaaaagggcttccagtcccgtcaccttgcctgcctgcctcgggagccagggctgtgcacctggcagtccctgcggtcccagatagcctgaatcctgcccggagtggaagctgaagcctgcacagtgtccaccctgttcccactcccatctttcttccggacaatgaaataaagagttaccacccagca

SEQ ID NO: 168 - protein, 207 aa, Homo sapiens
MAPFEPLASGILLLLWLIAPSRACTCVPPHPQTAFCNSDLVIRAKFVGTPEVNQTTLYQRYEIKMTKMYKGFQALGDAADIRFVYTPAMESVCGYFHRSHNRSEEFLIAGKLQDGLLHITTCSFVAPWNSLSLAQRRGFTKTYTVGCEECTVFPCLSIPCKLQSGTHCLWTDQLLQGSEKGFQSRHLACLPREPGLCTWQSLRSQIA

SEQ ID NO: 169 - DNA, 1462 bp, Homo sapiens
gcccgcgccgcgccgctctttctccgacagctgccgggggtgccctgcaagctgttccgcgcgtcctgcccgtctgtccccgcgggtcgtcgcccgccacagccgcgccatgaccacccagcagatagacctccagggcccggggccgtggggcttccgcctcgtgggcggcaaggacttcgagcagcctctcgccatttcccgggtcactcctggaagcaaggcggctctagctaatttatgtattggagatgtaatcacagccattgatggggaaaatactagcaatatgacacacttggaagctcagaacagaatcaaaggctgcacagacaacttgactctcactgtagccagatctgaacataaagtctggtctcctctggtgacggaggaagggaagcgtcatccatacaagatgaatttagcctctgaaccccaggaggtcctgcacataggaagcgcccacaaccgaagtgccatgccctttaccgcctcgcctgcctccagcactactgccagggtcatcacaaaccagtacaacaacccagctggcctctactcttctgaaaatatctccaacttcaacaatgccctggagtcaaagactgctgccagcggggtggaggcgaacagcagacccttagaccatgctcagcctccaagcagccttgtcatcgacaaagaatctgaagtttacaagatgcttcaggagaaacaggagttgaatgagcccccgaaacagtccacgtctttcttggttttgcaggaaatcctggagtctgaagaaaaaggggatcccaacaagccctcaggattcagaagtgttaaagctcctgtcactaaagtggctgcgtcgattggaaatgctcagaagttgcctatgtgtgacaaatgtggcactgggattgttggtgtgtttgtgaagctgcgggaccgtcaccgccaccctgagtgttatgtgtgcactgactgtggcaccaacctgaaacagaagggccatttctttgtggaggatcaaatctactgtgagaagcatgcccgggagcgagtcacaccacctgagggttatgaagtggtcactgtgttccccaagtgagccagcagatctgaccactgttctccagcaggcctctgctgcagctttttctctcagtgttctggccctctcctctcttgaaagttctctgcttactttggttttccctctgcttgtaaaacattgagtcccctccctgccttggttaattgactcacaccagctgtgcgatgcccgcttttacaattaaaggaaaactgttttgttcagtgtcaccttgtcagcaacactgtgtcccttcgccccaccgttcttctctgctgcatttggacatcagccaaatttgaacccaatcaaatataacgtgtctgacactgattttgtttttactcaataaatgtatagactacaaaaaaaaaaaaa

SEQ ID NO: 170 - protein, 329 aa, Homo sapiens
MTTQQIDLQGPGPWGFRLVGGKDFEQPLAISRVTPGSKAALANLCIGDVITAIDGENTSNMTHLEAQNRIKGCTDNLTLTVARSEHKVWSPLVTEEGKRHPYKMNLASEPQEVLHIGSAHNRSAMPFTASPASSTTARVITNQYNNPAGLYSSENISNFNNALESKTAASGVEANSRPLDHAQPPSSLVIDKESEVYKMLQEKQELNEPPKQSTSFLVLQEILESEEKGDPNKPSGFRSVKAPVTKVAASIGNAQKLPMCDKCGTGIVGVFVKLRDRHRHPECYVCTDCGTNLKQKGHFFVEDQIYCEKHARERVTPPEGYEVVTVFPK

SEQ ID NO: 171 - DNA, 1103 bp, Homo sapiens; identical to SEQ ID NO: 21

SEQ ID NO: 172 - protein, 107 aa, Homo sapiens; identical to SEQ ID NO: 22

SEQ ID NO: 173 - DNA, 1825 bp, Homo sapiens
tgcaattaaaggagtcgggtctctaactgttgatctgtttttttcccttctgagcaatggagcttaccatctttatcctgagactggccatttacatcctgacatttcccttgtacctgctgaactttctgggcttgtggagctggatatgcaaaaaatggttcccctacttcttggtgaggttcactgtgatatacaacgaacagatggcaagcaagaagcgggagctcttcagtaacctgcaggagtttgcgggcccctccgggaaactctccctgctggaagtgggctgtggcacgggggccaacttcaagttctacccacctgggtgcagggtgacctgtattgaccccaaccccaactttgagaagtttttgatcaagagcattgcagagaaccgacacctgcagtttgagcgctttgtggtagctgccggggagaacatgcaccaggtggctgatggctctgtggatgtggtggtctgcaccctggtgctgtgctctgtgaagaaccaggagcggattctccgcgaggtgtgcagagtgctgagaccgggaggggctttctatttcatggagcatgtggcagctgagtgttcgacttggaattacttctggcaacaagtcctggatcctgcctggcaccttctgtttgatgggtgcaacctgaccagagagagctggaaggccctggagcgggccagcttctctaagctgaagctgcagcacatccaggccccactgtcctgggagttggtgcgccctcatatctatggatatgctgtgaaatagtgtgagctggcagttaagagctgaatggctcaaagaatttaaagcttcagttttacatttaaaatgctaagtgggagaagagaaaccttttttttggggggcggtttttttggtttgttgttggttttttttttttttttggcaggagaatctcttgaacccagaaggcgaaggttgcagtgaaccgagatcatgccattgtactctagcctgggtgacaagagcaagactccgtctcaaaaaaaaaaaaaaaaaaaaaaagaagtagagacagggagacggggtctcactgtgttgcctaggccggtcttgaactcctgggctcaagtgattctcccaccttgacctcctaaattgttgggattacaggtgtgagacagtgcacctggccgaaatagctcaagtttctgaaaaacaaatctgaatctatttgttattcttagcgtcactggtctggctttcagaattaacatacaaggttgccacacctagttctgcccagctttatgtcttttattccagtattccaccaaagtttgttttcctgcattccagttctcaagtcttaagataaagattgtacttgacagtttagtatatccataaaactatttgaggtggttaaggttcttgggttcattttccttaatactttgctgaatattgtagattgtaggcaatgaaaaagtctactaaattaggaaaaccttgaataattaggtatcctaggtaagagcccctaaacatcaagcaatctgtgagtctgtaaagaaataaatattttttggattattcttatctaattccacccctgttggaagatgatttctttgttctttgcaactatggaagctgtgaaaatcatcacaagtgcctctgaaagcgagtgttaggttggttagagggtttaatattttctgcaatggtttgtaggaattttaataaatgtagtatattttctgagatgattttgtaaaagtactattttaaatatcaaatcaaccaataaattcacatttgtgttaggaacaaaa

SEQ ID NO: 174 - protein, 244 aa, Homo sapiens
MELTIFILRLAIYILTFPLYLLNFLGLWSWICKKWFPYFLVRFTVIYNEQMASKKRELFSNLQEFAGPSGKLSLLEVGCGTGANFKFYPPGCRVTCIDPNPNFEKFLIKSIAENRHLQFERFVVAAGENMHQVADGSVDVVVCTLVLCSVKNQERILREVCRVLRPGGAFYFMEHVAAECSTWNYFWQQVLDPAWHLLFDGCNLTRESWKALERASFSKLKLQHIQAPLSWELVRPHIYGYAVK

SEQ ID NO: 175 - DNA, 8042 bp, Homo sapiens
gtctcctgctatcaggtaatgccaacctcaaccccctggaccagtcaccccgatcagactttgcttgcctgattttaggccaggtcagacatcagaggagagcccagatccttgtttcctctccccccgcagggcttcccctttcttggtcatcgatccctagagctctggctctttctcttcttggggtgagaaactgctaagaacagtttatttcccatgcatgcatctgggcttgccactgatctgccttttcccccctcctccccaggttagggacacctgggtccaaccttcccaaggaatatggggatgggggttggagatgaagtttagtgctagactgtaaggtaggtggggtggaagtacatgagggaaagggctaaaatggtactaatggtgttaaggatagggtgaattatttaagaggaaaaagactaggcccaggttctccttagccatgtggctttcccagggcagagggtggcccctccctacccaggggcccagcagagactgacttttgatccctaccccagagaccagtgaaccattaactcctctcttatgtgagccttcacacactggccccacccctgaccccgccccaaggcaggtgggctaggagggggtgcatgtccatctcagccttctatgtgacgtggcctccgatccacctggacacctggaggctaagcctggattcccccttccctgactcaggaactgcttaacgtctacagcaaggcctaataggggacctgagggcacagtcctcaggatgtttcggggagaataggagccagaacctgagcccctaagctattcccctcaccaatgatggggtccccagtgagtcatctgctggccggcttctgtgtgtgggtcgtcttgggctgggtagggggctcagtccccaacctgggccctgctgagcaggagcagaaccattacctggcccagctgtttggcctgtacggcgagaatgggacgctgactgcagggggcttggcgcggcttctccacagcctggggctaggccgagttcaggggcttcgcctgggacagcatgggcctctgactggacgggctgcatccccagctgcagacaattccacacacaggccacagaaccctgagctgagtgtggatgtctgggcagggatgcctctgggtccctcagggtggggtgacctggaagagtcaaaggcccctcacctaccccgtgggccagccccctcgggcctggacctccttcacaggcttctgttgctggaccactcattggctgaccacctgaatgaggattgtctgaacggctcccagctgctggtcaattttggcttgagccccgctgctcctctgacccctcgtcagtttgctctgctgtgcccagccctgctttatcagatcgacagccgcgtctgcatcggcgctccggcccctgcacccccaggggatctactatctgccctgcttcagagtgccctggcagtcctgttgctcagcctcccttctcccctatccctgctgctgctgcggctcctgggacctcgtctactacggcccttgctgggcttcctgggggccctggcggtgggcactctttgtggggatgcactgctacatctgctaccgcatgcacaagaagggcggcacgcaggacctggcggactaccagagaaggacctgggcccggggctgtcagtgctcggaggcctcttcctgctctttgtgctggagaacatgctggggcttttgcggcaccgagggctcaggccaagatgctgcaggcgaaaacgaaggaatctcgaaacacgcaacttggatccggagaatggcagtgggatggcccttcagcccctacaggcagctccagagccaggggctcagggccagagggagaagaacagccagcacccaccagctctggcccctcctgggcaccaaggccacagtcatgggcaccagggtggcactgatatcacgtggatggtcctcctgggagatggtctacacaacctcactgatgggctggccataggtgctgccttctctgatggcttctccagcggcctcagtaccaccttagcggtcttctgccatgagctgccccacgaactgggtgactttgccatgctgctccagtcagggctgtcctttcggcggctgctgctgctgagcctcgtgtctggagccctgggattggggggtgcagtcctgggggtggggctcagcctgggccctgtccccctcactccctgggtgtttggggtcactgctggggtcttcctctatgtggcccttgtggacatgctaccagccctgcttcgtcctccggagcccctgcctacgccccatgtgctcctgcaggggctggggctgctgctggggggcggcctcatgcttgccataaccctgctggaggagcggctactgcccgtgaccactgagggctgatggggccagtggaaaggggtcgggttgcccttccttccccccaaccacaggaatggaggcgggacacagggccagtaggagcaataggattttaataaacagaacccatcccaaagccatgactacgacagttgtacttgcaccaaaacagcatagaaaaccagagtgtggtgggaggacccgaagccggttgggggaggatgtgagtaggggcctggagggtgcagggtcattaatctgcggggagaacattgtgctttagcccagggaggggaggggtggggcaaatgcaccgaggtccccactttttcctgctgccctcggcaccctggggatgcaggcatctgggcacatctgccccttattgctgcccaccagcgttaaacgcccccgatcccaacactagcaccacaggtggttccggggcagggagaggcaggaatgggaaaattgcttagagaaagattccactagaatccagtgaattgtgctcagttctctttacttcctacaaccgagtacatgggtcacagggtggagggtgcaacaggacatggaacatgcccctccgtgccccccaacacacacctgcacacaggatggtggtgtctgcagcatcacaggtcatgcagggcatggggaaggggaggttcacacacacatagatgcccacagcgggtaccagacggagaacacccctgaatatacatagctgtacatggggaacccccaggtccccaccccaaccctctcccctgtcttgctgtcccccgcaggggaactatattgctttgagagagccaccccaggggctgctctgccaggcaccctcccctcccacccacccccattttggcacatctgcaagacacacagcagcgagagtaggcaccctcccttcccaggcttctgtggcctggagctggagaagggggtaggagacttcatcctccatcctcccctaacccttcccaaacccctgccaaacccactcaagccagaacccacccccaccccccaaacacacatacaaagctgagctatccaggaacacaagggaaacaaggagattgtccagggtgggagcggaggcagcgggggaagaagactggaagcagagacctccccccttgtggggggcagactggcacaacagctactttagtgcaattggagagggtgcccagagtgagaggtggagaagggagggaaggcggtccccaacttccctgggggcaaagtcaggcttccagattccccagggaaagggcctagcaggagtgggtgagggccaaggtggatcctctggttacccgccaccctctgccctcccaaatgcagtgacagtgtccccctcacacctaagtgggcaacagcagccttggagtcagtaccttcaagtaattcaaagagcagaccctccccaccccagcttcaccccatctctgggatttggtcgcttctctaggggttgggttgggaggagggagcccccaaggcagacccttccctctctacctcccgattcccagaccactgggcttggtcctcaaagattcctcacctccgcccttgcccaacctgggtcaaggctgcagaaggctggagccaccacaattagaggggaaggggctgctttgttccttatccctccttcttaaaaggtagggttcaaactaggcgggatgggggcccatactggtttgccccaggagtagggtttctgggctagggtctgtaaggctattttcctttgcggtgggaaggggaggtaggggatgaacactgggtatgggaagtgggtgagaaatggctgagagggaaggaggaaggggcctccccgctggagcagtcactggagtcatttagacaaaaacactcatgtgcataagatacacagtgcgcaaactcagccctgccagcccggccccaatcccacctctcaggactccttccaagaccctggaggaggttctggggatacagctgtagaaccgttcactctggccccatccaccccacctccagcctcttctccccttctaggtccagggagtaagaaggtgctcgggtgggcagacagtggtggaaacagtattgagttttcctttggttacatattgaaggcaaaggtgagctggacttacagtcaaaacggataggggtgaggaaggaagaggggccatggctggggttggagagggaggtaggccctcctcagcccctccaccccaagaaacacatctacgtggggtggcagtccctcagtcttttctctcccacgccccacagcaccaaacaaaaggagaagccccctcccccaggggctgctccccaccccaacctgggctgtacattcagtggttttcagcagtcctatggctcagggggccacggggcaggggaggtggcccgtcagtctcagtggacagtggcagtgacccgggtctgctggtccttcctgggacccacggtttgtgccattcgtttttctgaaggatagtatatgaccctaccagagccaccgcccaatcagaaatagctcccccaaaatcagaaactaaaaactggctctttccatctcaccctctgattcacacgtctgtttccctgtctcctatgtcgccctcgctctgtttcctttgctgggacctggggctgctcccagggtcctcgcttaaaataggccttttcacaaaagtgcttattacttgaagcaagtgctttagggctgcggtggggagaggggggagggggagggcaaagggaaggcgctgttccctccccgccctcccccatgaagactggggggcattctgcctgttttacttctccacacccgtttaagtcaaagaggtttaaaaaaaatcttaacattaaaataaatatgcagtggccatgagaatggtcaaaatgcttcaaaaaacactagggctggggagcccagggtggggcgtggggtttcctttggcataaggagaggaggctgcttgtcccccaggcttcctcacagccacatatggagggacagaggactccccaccacctcccagcactgctgacagtgcgctgagggcagcagggcgcagacagcccccagaaatctcatctagcaagacaacggggctctgacactcagacgcttcccgccatcaccaaacatcacgaaaggagaacacgactcacacccggcaagttctctctggaggacccatcttctcactccccttgccccccaccacctaattcccagcaccaagatgagagggagggggtggaatgggaagatttcaggagagagaattgaagggaaggcaagctttgcagagccagcagggttggggatgggggctgcagcccttaagagaggtcacattgattgtcatataggggaggacacggtgtggagggaggtgggcaagaggggcgtcacaaggccctttggctttgaaaataaaaataaaaactaaaagctgcacaatccttctcatcaataatggtcatttggaagccttgaaatgatttaggaactgagggttgggagaagcaaaacacagagagacaggggatcaaaagggaccatgaaaagataaggacttggacaacaccccaggcttctggaaaccagcatgaggtatggttaaaggtatccgttggggagggagggggtccctgggacgcccccctcccctcagcccacccttgacaagggtggcaagacattcagggtatacaactaaaagatgggtaagactgtgaataaagcaaacttgagtaggggagggaggctgaaggatcccccctcaggggagaccctgtactgtgtaaacgaagcctgtccagttctcaggggacaatactgatggcagccaaactgggcaaggatgcagtgtgggggcggagggggcatgacctctattcaagttctgtgtcttggcccctggctgaggtattgagtgtgaggaagggaacactgggctgcaggagtgggtccaactgtccaggaggctgcactaggagatgggtggacagagcacttaaagggaccagggccaaattcaatgctacatttagagagaaaactgccccctcttcactccagcccagtttggcttttggggtgcgactttagaaatcttatcagtgcagcccccagctcaatcccatctttcctccctgctgggaaggcagggaccaagccccagtacctattcatctctctctaggtcagagcttcttcctcacactggaggggaagcctgggtcccgagtagccacggtcccttgtcggccctgcccctcctaccatctttggcttcagatcaggagtgactggggcagtgggtactcttggacataacggaaggtggaggcagatagggagcacagataaactatgggcttggcggcacaggaggaagaacatggtccctccctccatatacatgcaaacacatgcctgaaacacagtggacatactagggctgtggttttgaaatgggcaggaaattaatttgtttcttcccctaaaggataaaacgcttacttaaaaattcatgacaagcctcaaagttcaagggaaggagagccagggcaggaatgaccacaggctctgccctcccaaaagaagataaaagaaagaagcaaggttaaagtgcgtggttaggggccaggctaggagtgggagggaatggggagggggcaggctgtgggggcagaaccagcccttgatttgcatatgaggagccaggggagagtgcaggattggggcccaggtacagtagttgctgcttcaagtgttttgcatttgaactttaggggtgatagggtacagaagtggggaaaaagctccaggccccagtgctaaatatcctcccccctcatcctctagctgcccctgaaggggggagggggacacccccagagtgctcacacagtaccagaaattaaggcttctcactgctgcggggatggagggaccggccgagcagggaggcagtgatgggtatggaagaagaggggatctgcctggcagtaggggcaggggagaagggggacacagagaggagtccccagggaagagtcgggggagctggcagcagaaagagggaaccaagagatggagtcaaagagtgggggagccaggcatttagcaatcattttgggacacttggcagaaggggtcgccctgggggtaccaagggcctggggtgctccctgtcagtcccagacccctgccaggccaagatggtgtggcaaaggggtgagcagctgctccccagggcttccttcccctccgccccctccacccagtcgtgttctcctttaaagtgccctaaatgtttagactttttctaaataaatagaattagatatcaagccaccggcgggggagggacactggagggggctactcagagtagcagccatctaacccaatggcgccgggccgctcctggctgtaggggcaggaggccccatggggcagggcgccgcagccacccaccgtcttggcggctgcaatgctgcagttcttgagcaggctgaagctgaaaggactgacggcgtccttgggtgggaaa

SEQ ID NO: 176 - protein, 540 aa, Homo sapiens
MMGSPVSHLLAGFCVWVVLGWVGGSVPNLGPAEQEQNHYLAQLFGLYGENGTLTAGGLARLLHSLGLGRVQGLRLGQHGPLTGRAASPAADNSTHRPQNPELSVDVWAGMPLGPSGWGDLEESKAPHLPRGPAPSGLDLLHRLLLLDHSLADHLNEDCLNGSQLLVNFGLSPAAPLTPRQFALLCPALLYQIDSRVCIGAPAPAPPGDLLSALLQSALAVLLLSLPSPLSLLLLRLLGPRLLRPLLGFLGALAVGTLCGDALLHLLPHAQEGRHAGPGGLPEKDLGPGLSVLGGLFLLFVLENMLGLLRHRGLRPRCCRRKRRNLETRNLDPENGSGMALQPLQAAPEPGAQGQREKNSQHPPALAPPGHQGHSHGHQGGTDITWMVLLGDGLHNLTDGLAIGAAFSDGFSSGLSTTLAVFCHELPHELGDFAMLLQSGLSFRRLLLLSLVSGALGLGGAVLGVGLSLGPVPLTPWVFGVTAGVFLYVALVDMLPALLRPPEPLPTPHVLLQGLGLLLGGGLMLAITLLEERLLPVTTEG

SEQ ID NO: 177 - DNA, 3600 bp, Homo sapiens
cccagactccagccctggaccgcgcatcccgagcccagcgcccagacagagtgtccccacaccctcctctgagacgccatgttcaactcgatgaccccaccaccaatcagtagctatggcgagccctgctgtctccggcccctccccagtcagggggcccccagtgtggggacagaaggactgtctggcccgcccttctgccaccaagctaacctcatgtccggcccccacagttatgggccagccagagagaccaacagctgcaccgagggcccactcttttcttctccccggagtgcagtcaagttgaccaagaagcgggcactgtccatctcacctctgtcggatgccagcctggacctgcagacggttatccgcacctcacccagctccctcgtagctttcatcaactcgcgatgcacatctccaggaggctcctacggtcatctctccattggcaccatgagcccatctctgggattcccagcccagatgaatcaccaaaaagggccctcgccttcctttggggtccagccttgtggtccccatgactctgcccggggtgggatgatcccacatcctcagtcccggggacccttcccaacttgccagctgaagtctgagctggacatgctggttggcaagtgccgggaggaacccttggaaggtgatatgtccagccccaactccacaggcatacaggatcccctgttggggatgctggatgggcgggaggacctcgagagagaggagaagcgtgagcctgaatctgtgtatgaaactgactgccgttgggatggctgcagccaggaatttgactcccaagagcagctggtgcaccacatcaacagcgagcacatccacggggagcggaaggagttcgtgtgccactgggggggctgctccagggagctgaggcccttcaaagcccagtacatgctggtggttcacatgcgcagacacactggcgagaagccacacaagtgcacgtttgaagggtgccggaagtcatactcacgcctcgaaaacctgaagacgcacctgcggtcacacacgggtgagaagccatacatgtgtgagcacgagggctgcagtaaagccttcagcaatgccagtgaccgagccaagcaccagaatcggacccattccaatgagaagccgtatgtatgtaagctccctggctgcaccaaacgctatacagatcctagctcgctgcgaaaacatgtcaagacagtgcatggtcctgacgcccatgtgaccaaacggcaccgtggggatggccccctgcctcgggcaccatccatttctacagtggagcccaagagggagcgggaaggaggtcccatcagggaggaaagcagactgactgtgccagagggtgccatgaagccacagccaagccctggggcccagtcatcctgcagcagtgaccactccccggcagggagtgcagccaatacagacagtggtgtggaaatgactggcaatgcagggggcagcactgaagacctctccagcttggacgagggaccttgcattgctggcactggtctgtccactcttcgccgccttgagaacctcaggctggaccagctacatcaactccggccaatagggacccggggtctcaaactgcccagcttgtcccacaccggtaccactgtgtcccgccgcgtgggccccccagtctctcttgaacgccgcagcagcagctccagcagcatcagctctgcctatactgtcagccgccgctcctccctggcctctcctttcccccctggctccccaccagagaatggagcatcctccctgcctggccttatgcctgcccagcactacctgcttcgggcaagatatgcttcagccagagggggtggtacttcgcccactgcagcatccagcctggatcggataggtggtcttcccatgcctccttggagaagccgagccgagtatccaggatacaaccccaatgcaggggtcacccggagggccagtgacccagcccaggctgctgaccgtcctgctccagctagagtccagaggttcaagagcctgggctgtgtccataccccacccactgtggcagggggaggacagaactttgatccttacctcccaacctctgtctactcaccacagccccccagcatcactgagaatgctgccatggatgctagagggctacaggaagagccagaagttgggacctccatggtgggcagtggtctgaacccctatatggacttcccacctactgatactctgggatatgggggacctgaaggggcagcagctgagccttatggagcgaggggtccaggctctctgcctcttgggcctggtccacccaccaactatggccccaacccctgtccccagcaggcctcatatcctgaccccacccaagaaacatggggtgagttcccttcccactctgggctgtacccaggccccaaggctctaggtggaacctacagccagtgtcctcgacttgaacattatggacaagtgcaagtcaagccagaacaggggtgcccagtggggtctgactccacaggactggcaccctgcctcaatgcccaccccagtgaggggcccccacatccacagcctctcttttcccattacccccagccctctcctccccaatatctccagtcaggcccctatacccagccaccccctgattatcttccttcagaacccaggccttgcctggactttgattcccccacccattccacagggcagctcaaggctcagcttgtgtgtaattatgttcaatctcaacaggagctactgtgggagggtgggggcagggaagatgcccccgcccaggaaccttcctaccagagtcccaagtttctggggggttcccaggttagcccaagccgtgctaaagctccagtgaacacatatggacctggctttggacccaacttgcccaatcacaagtcaggttcctatcccaccccttcaccatgccatgaaaattttgtagtgggggcaaatagggcttcacatagggcagcagcaccacctcgacttctgcccccattgcccacttgctatgggcctctcaaagtgggaggcacaaaccccagctgtggtcatcctgaggtgggcaggctaggagggggtcctgccttgtaccctcctcccgaaggacaggtatgtaaccccctggactctcttgatcttgacaacactcagctggactttgtggctattctggatgagccccaggggctgagtcctcctccttcccatgatcagcggggcagctctggacataccccacctccctctgggccccccaacatggctgtgggcaacatgagtgtcttactgagatccctacctggggaaacagaattcctcaactctagtgcctaaagagtagggaatctcatccatcacagatcgcatttcctaaggggtttctatccttccagaaaaattgggggagctgcagtcccctgcacaagatgccccagggatgggaggtatgggctgggggctatgtatagtctgtatacgttttgaggagaaatttgataatgacactgtttcctgataataaaggaactgcatcag

SEQ ID NO: 178 - protein, 1106 aa, Homo sapiens
MFNSMTPPPISSYGEPCCLRPLPSQGAPSVGTEGLSGPPFCHQANLMSGPHSYGPARETNSCTEGPLFSSPRSAVKLTKKRALSISPLSDASLDLQTVIRTSPSSLVAFINSRCTSPGGSYGHLSIGTMSPSLGFPAQMNHQKGPSPSFGVQPCGPHDSARGGMIPHPQSRGPFPTCQLKSELDMLVGKCREEPLEGDMSSPNSTGIQDPLLGMLDGREDLEREEKREPESVYETDCRWDGCSQEFDSQEQLVHHINSEHIHGERKEFVCHWGGCSRELRPFKAQYMLVVHMRRHTGEKPHKCTFEGCRKSYSRLENLKTHLRSHTGEKPYMCEHEGCSKAFSNASDRAKHQNRTHSNEKPYVCKLPGCTKRYTDPSSLRKHVKTVHGPDAHVTKRHRGDGPLPRAPSISTVEPKREREGGPIREESRLTVPEGAMKPQPSPGAQSSCSSDHSPAGSAANTDSGVEMTGNAGGSTEDLSSLDEGPCIAGTGLSTLRRLENLRLDQLHQLRPIGTRGLKLPSLSHTGTTVSRRVGPPVSLERRSSSSSSISSAYTVSRRSSLASPFPPGSPPENGASSLPGLMPAQHYLLRARYASARGGGTSPTAASSLDRIGGLPMPPWRSRAEYPGYNPNAGVTRRASDPAQAADRPAPARVQRFKSLGCVHTPPTVAGGGQNFDPYLPTSVYSPQPPSITENAAMDARGLQEEPEVGTSMVGSGLNPYMDFPPTDTLGYGGPEGAAAEPYGARGPGSLPLGPGPPTNYGPNPCPQQASYPDPTQETWGEFPSHSGLYPGPKALGGTYSQCPRLEHYGQVQVKPEQGCPVGSDSTGLAPCLNAHPSEGPPHPQPLFSHYPQPSPPQYLQSGPYTQPPPDYLPSEPRPCLDFDSPTHSTGQLKAQLVCNYVQSQQELLWEGGGREDAPAQEPSYQSPKFLGGSQVSPSRAKAPVNTYGPGFGPNLPNHKSGSYPTPSPCHENFVVGANRASHRAAAPPRLLPPLPTCYGPLKVGGTNPSCGHPEVGRLGGGPALYPPPEGQVCNPLDSLDLDNTQLDFVAILDEPQGLSPPPSHDQRGSSGHTPPPSGPPNMAVGNMSVLLRSLPGETEFLNSSA

SEQ ID NO: 179 - DNA, 4111 bp, Homo sapiens
acacaccacacacactcacactcacacacactcacacacactcatccccttgaatcttggggcaggaactcagaaaacttccagcccgggcagcgcgcgcttggtgcaagactcaggagctagcagcccgtccccctccgactctccggtgccgccgctgcctgctcccgccaccctaggaggcgcggtgccacccactactctgtcctctgcctgtgctccgtgcccgaccctatcccggcggagtctccccatcctcctttgctttccgactgcccaaggcactttcaatctcaatctcttctctctctctctctctctctctgtctctctctctctctctctctctctctctctcgcagggtggggggaagaggaggaggaattctttccccgcctaacatttcaagggacacaattcactccaagtctcttccctttccaagccgcttccgaagtgctcccggtgcccgcaactcctgatcccaacccgcgagaggagcctctgcgacctcaaagcctctcttccttctccctcgcttccctcctcctcttgctacctccacctccaccgccacctccacctccggcacccacccaccgccgccgccgccaccggcagcgcctcctcctctcctcctcctcctcccctcttctctttttggcagccgctggacgtccggtgttgatggtggcagcggcggcagcctaagcaacagcagccctcgcagcccgccagctcgcgctcgccccgccggcgtccccagccctatcacctcatctcccgaaaggtgctgggcagctccggggcggtcgaggcgaagcggctgcagcggcggtagcggcggcgggaggcaggatgagcgcacgcggtgagggcgcggggcagccgtccacttcagcccagggacaacctgccgccccagcgcctcagaagagaggacgcggccgccccaggaagcagcagcaagaaccaaccggtgagccctctcctaagagacccaggggaagacccaaaggcagcaaaaacaagagtccctctaaagcagctcaaaagaaagcagaagccactggagaaaaacggccaagaggcagacctaggaaatggccacaacaagttgttcagaagaagcctgctcaggaggaaactgaagagacatcctcacaagagtctgccgaagaggactagggggcgcaacgttcgatttctacctcagcagcagttggatcttttgaagggagaagacactgcagtgaccacttattctgtattgccatggtctttccactttcatctggggtggggtggggtggggtgggggaggggggggtggggtggggagaaatcacataaccttaaaaaggactatattaatcaccttctttgtaatcccttcacagtcccaggtttagtgaaaaactgctgtaaacacaggggacacagcttaacaatgcaacttttaattactgttttcttttttcttaacctactaatagtttgttgatctgataagcaagagtgggcgggtgagaaaaaccgaattgggtttagtcaatcactgcactgcatgcaaacaagaaacgtgtcacacttgtgacgtcgggcattcatataggaagaacgcggtgtgtaacactgtgtacacctcaaataccaccccaacccactccctgtagtgaatcctctgtttagaacaccaaagataaggactagatactactttctctttttcgtataatcttgtagacacttacttgatgatttttaactttttatttctaaatgagacgaaatgctgatgtatcctttcattcagctaacaaactagaaaaggttatgttcatttttcaaaaagggaagtaagcaaacaaatattgccaactcttctatttatggatatcacacatatcagcaggagtaataaatttactcacagcacttgttttcaggacaacacttcattttcaggaaatctacttcctacagagccaaaatgccatttagcaataaataacacttgtcagcctcagagcatttaaggaaactagacaagtaaaattatcctctttgtaatttaatgaaaaggtacaacagaataatgcatgatgaactcacctaattatgaggtgggaggagcgaaatctaaatttcttttgctatagttatacatcaatttaaaaagcaaaaaaaaaaaggggggggcaatctctctctgtgtctttctctctctctctccctctccctctctcttttcatgtgtatcagtttccatgaaagacctgaataccacttacctcaaattaagcatatgtgttacttcaagtaatacgttttgacataagatggttgaccaaggtgcttttcttcggcttgagttcaccatctcttcattcaaactgcacttttagccagagatgcaatatatccccactactcaatactacctctgaatgttacaacgaatttacagtctagtacttattacatgctgctatacacaagcaatgcaagaaaaaaacttactgggtaggtgattctaatcatctgcagttctttttgtacacttaattacagttaaagaagcaatctccttactgtgtttcagcatgactatgtatttttctatgtttttttaattaaaaatttttaaaatacttgtttcagcttctctgctagatttctacattaacttgaaaattttttaaccaagtcgctcctaggttcttaaggataattttcctcaatcacactacacatcacacaagatttgactgtaatatttaaatattaccctccaagtctgtacctcaaatgaattctttaaggagatggactaattgacttgcaaagacctacctccagacttcaaaaggaatgaacttgttacttgcagcattcatttgttttttcaatgtttgaaatagttcaaactgcagctaaccctagtcaaaactatttttgtaaaagacatttgatagaaaggaacacgtttttacatacttttgcaaaataagtaaataataaataaaataaagccaaccttcaaagaacttgaagctttgtaggtgagatgcaacaagccctgcttttgcataatgcaatcaaaaatatgtgtttttaagattagttgaatataagaaaatgcttgacaaatattttcatgtattttacacaaatgtgatttttgtaatatgtctcaaccagatttattttaaacgcttcttatgtagagtttttatgcctttctctcctagtgagtgtgctgactttttaacatggtattatcaactgggccaggaggtagtttctcatgacggcttttgtcagtatggcttttagtactgaagccaaatgaaactcaaaaccatctctcttccagctgcttcagggaggtagtttcaaaggccacatacctctctgagactggcagatcgctcactgttgtgaatcaccaaaggagctatggagagaattaaaactcaacattactgttaactgtgcgttaaataagcaaataaacagtggctcataaaaataaaagtcgcattccatatctttggatgggccttttagaaacctcattggccagctcataaaatggaagcaattgctcatgttggccaaacatggtgcaccgagtgatttccatctctggtaaagttacacttttatttcctgtatgttgtacaatcaaaacacactactacctcttaagtcccagtatacctcatttttcatactgaaaaaaaaagcttgtggccaatggaacagtaagaacatcataaaatttttatatatatagtttatttttgtgggagataaattttataggactgttctttgctgttgttggtcgcagctacataagactggacatttaacttttctaccatttctgcaagttaggtatgtttgcaggagaaaagtatcaagacgtttaactgcagttgactttctccctgttcctttgagtgtcttctaactttattctttgttctttatgtagaattgctgtctatgattgtactttgaatcgcttgcttgttgaaaatatttctctagtgtattatcactgtctgttctgcacaataaacataacagcctctgtga

SEQ ID NO: 180 - protein, 109 aa, Homo sapiens
MSARGEGAGQPSTSAQGQPAAPAPQKRGRGRPRKQQQEPTGEPSPKRPRGRPKGSKNKSPSKAAQKKAEATGEKRPRGRPRKWPQQVVQKKPAQEETEETSSQESAEED

SEQ ID NO: 181 - DNA, 3252 bp, Homo sapiens
gcggcccaggcccggaaccttccctggtcgtgcgccctatgtaaggccagccgcggcaggaccaaggcggcggtgtcagctcgcgagcctaccctccgcggacggtcttgggtcgcctgctgcctggcttgcctggtcggcggcgggtgccccgcgcgcacgcgcaaagcccgccgcgttccccgaccccaggccgcgctctgtgggcctctgagggcggcatgcgggactacgacgaggtgaccgccttcctgggcgagtgggggcccttccagcgcctcatcttcttcctgctcagcgccagcatcatccccaatggcttcaccggcctgtcctccgtgttcctgatagcgaccccggagcaccgctgccgggtgccggacgccgcgaacctgagcagcgcctggcgcaaccacactgtcccactgcggctgcgggacggccgcgaggtgccccacagctgccgccgctaccggctcgccaccatcgccaacttctcggcgctcgggctggagccggggcgcgacgtggacctggggcagctggagcaggagagctgtctggatggctgggagttcagtcaggacgtctacctgtccaccattgtgaccgagtggaacctggtgtgtgaggacgactggaaggccccactcacaatctccttgttcttcgtgggtgtgctgttgggctccttcatttcagggcagctgtcagacaggtttggccggaagaatgtgctgttcgtgaccatgggcatgcagacaggcttcagcttcctgcagatcttctcgaagaattttgagatgtttgtcgtgctgtttgtccttgtaggcatgggccagatctccaactatgtggcagcatttgtcctggggacagaaattcttggcaagtcagttcgtataatattctctacgttaggagtgtgcatattttatgcatttggctacatggtgctgccactgtttgcttacttcatccgagactggcggatgctgctggtggcgctgacgatgccgggggtgctgtgcgtggcactctggtggttcatccctgagtccccccgatggctcatctctcagggacgatttgaagaggcagaggtgatcatccgcaaggctgccaaagccaatgggattgttgtgccttccactatctttgacccgagtgagttacaagacctaagttccaagaagcaacagtcccacaacattctggatctgcttcgaacctggaatatccggatggtcaccatcatgtccataatgctgtggatgaccatatcagtgggctattttgggctttcgcttgatactcctaacttgcatggggacatctttgtgaactgcttcctttcagcgatggttgaagtcccagcatatgtgttggcctggctgctgctgcaatatttgccccggcgctattccatggccactgccctcttcctgggtggcagtgtccttctcttcatgcagctggtacccccagacttgtattatttggctacagtcctggtgatggtgggcaagtttggagtcacggctgccttttccatggtctacgtgtacacagccgagctgtatcccacagtggtgagaaacatgggtgtgggagtcagctccacagcatcccgcctgggcagcatcctgtctccctacttcgtttaccttggtgcctacgaccgcttcctgccctacattctcatgggaagtctgaccatcctgacagccatcctcaccttgtttctcccagagagcttcggtaccccactcccagacaccattgaccagatgctaagagtcaaaggaatgaaacacagaaaaactccaagtcacacaaggatgttaaaagatggtcaagaaaggcccacaatccttaaaagcacagccttctaacatcgcttccagtaagggagaaactgaagaggaaagactgtcttgctagaaatggccagcttgtgcagactccgagtccttcagtgacaaaggcctttgctgtttgtcctcttgacctgtgtctgacttgctcctggatgggcacccacactcagaggctacatatggccctagagcaccaccttcctctagggacactggggctacctacagacaacttcatctaagtcctaactattacaatgatggactcagcacctccaaagcagttaatttttcactagaaccagtgagatctggaggaatgtgagaagcatatgctaaatgtacattttaattttagactacttgaaaaggcccctaataaggctagaggtctaagtcccccacccctttccccactcccctctagtggtgaactttagaggaaaaggaagtaattgcacaaggagtttgattcttaccttttctcagttacagaggacattaactggatcattgcttccccagggcaggagagcgcagagctagggaaagtgaaaggtaatgaagatggagcagaatgagcagatgcagatcaccagcaaagtgcactgatgtgtgagctcttaagaccactcagcatgacgactgagtagacttgtttacatctgatcaaagcactgggcttgtccaggctcataataaatgctccattgaatctactattcttgttttccactgctgtggaaacctccttgctactatagcgtcttatgtatggtttaaaggaaatttatcaggtgagagagatgagcaacgttgtcttttctctcaaagctgtaatgtgggttttgttttactgtttatttgtttgttgttgtatccttttctccttgttatttgcccttcagaatgcacttgggaaaggctggttccttagcctcctggtttgtgtctttttttttttttttttaaacacagaatcactctggcaattgtctgcagctgccactggtgcaaggccttaccagccctagcctctagcacttctctaagtgccaaaaacagtgtcattgtgtgtgttcctttcttgatacttagtcatgggaggatattacaaaaaagaaatttaaattgtgttcatagtctttcagagtagctcactttagtcctgtaactttattgggtgatattttgtgttcagtgtaattgtcttctctttgctgattatgttaccatggtactcctaaagcatatgcctcacctggttaaaaaagaacaaacatgtttttgtgaaagctactgaagtgccttgggaaatgagaaagttttaataagtaaaatgattttttaaatatcaaaaaaaaaaaaaaaa

SEQ ID NO: 182 - protein, 557 aa, Homo sapiens
MRDYDEVTAFLGEWGPFQRLIFFLLSASIIPNGFTGLSSVFLIATPEHRCRVPDAANLSSAWRNHTVPLRLRDGREVPHSCRRYRLATIANFSALGLEPGRDVDLGQLEQESCLDGWEFSQDVYLSTIVTEWNLVCEDDWKAPLTISLFFVGVLLGSFISGQLSDRFGRKNVLFVTMGMQTGFSFLQIFSKNFEMFVVLFVLVGMGQISNYVAAFVLGTEILGKSVRIIFSTLGVCIFYAFGYMVLPLFAYFIRDWRMLLVALTMPGVLCVALWWFIPESPRWLISQGRFEEAEVIIRKAAKANGIVVPSTIFDPSELQDLSSKKQQSHNILDLLRTWNIRMVTIMSIMLWMTISVGYFGLSLDTPNLHGDIFVNCFLSAMVEVPAYVLAWLLLQYLPRRYSMATALFLGGSVLLFMQLVPPDLYYLATVLVMVGKFGVTAAFSMVYVYTAELYPTVVRNMGVGVSSTASRLGSILSPYFVYLGAYDRFLPYILMGSLTILTAILTLFLPESFGTPLPDTIDQMLRVKGMKHRKTPSHTRMLKDGQERPTILKSTAF

SEQ ID NO: 183 - DNA, 2135 bp, Homo sapiens
ccccggcttcgcgccccaatttctaacagcctgcctgtcccccgggaacgttctaacatccttggggagcgccccagctacaagacactgtcctgagaacgctgtcatcacccgtagttgcaagtttcggagcggcagtgggaagcatgcgggactacgacgaggtgatcgccttcctgggcgagtgggggcccttccagcgcctcatcttcttcctgctcagcgccagcatcatccccaatggcttcaatggtatgtcagtcgtgttcctggcggggaccccggagcaccgctgtcgagtgccggacgccgcgaacctgagcagcgcctggcgcaacaacagtgtcccgctgcggctgcgggacggccgcgaggtgccccacagctgcagccgctaccggctcgccaccatcgccaacttctcggcgctcgggctggagccggggcgcgacgtggacctggggcagctggagcaggagagctgcctggatggctgggagttcagccaggacgtctacctgtccaccgtcgtgaccgagtggaatctggtgtgtgaggacaactggaaggtgcccctcaccacctccctgttcttcgtaggcgtgctcctcggctccttcgtgtccgggcagctgtcagacaggtttggcaggaagaacgttctcttcgcaaccatggctgtacagactggcttcagcttcctgcagattttctccatcagctgggagatgttcactgtgttatttgtcatcgtgggcatgggccagatctccaactatgtggtagccttcatactaggaacagaaattcttggcaagtcagttcgtattatattctctacattaggagtgtgcacattttttgcagttggctatatgctgctgccactgtttgcttacttcatcagagactggcggatgctgctgctggcgctgacggtgccgggagtgctgtgtgtcccgctgtggtggttcattcctgaatctccccgatggctgatatcccagagaagatttagagaggctgaagatatcatccaaaaagctgcaaaaatgaacaacacagctgtaccagcagtgatatttgattctgtggaggagctaaatcccctgaagcagcagaaagctttcattctggacctgttcaggactcggaatattgccataatgaccattatgtctttgctgctatggatgctgacctcagtgggttactttgctctgtctctggatgctcctaatttacatggagatgcctacctgaactgtttcctctctgccttgattgaaattccagcttacattacagcctggctgctattgcgaacgctgcccaggcgttatatcatagctgcagtactgttctggggaggaggtgtgcttctcttcattcaactggtacctgtggattattacttcttatccattggtctggtcatgctgggaaaatttgggatcacctctgctttctccatgctgtatgtcttcactgctgagctctacccaaccctggtcaggaacatggcggtgggggtcacatccacggcctccagagtgggcagcatcattgccccctactttgtttacctcggtgcttacaacagaatgctgccctacatcgtcatgggtagtctgactgtcctgattggaatcttcaccctttttttccctgaaagtttgggaatgactcttccagaaaccttagagcagatgcagaaagtgaaatggttcagatctgggaaaaaaacaagagactcaatggagacagaagaaaatcccaaggttctaataactgcattctgaaaaaatatctaccccatttggtgaagtgaaaaacagaaaaataagaccctgtggagaaattcgttgttcccactgaaatggactgactgtaacgattgacaccaaaatgaaccttgctatcaagaaatgctcgtcatacagtaaactctggatgattcttccagataatgtccttgctttacaaaccaaccatttctagagagtctccttactcattaattcaatgaaatggattggtaagatgtcttgaaaacatgttagtcaaggactggtaaaatacatataaagattaacactcatttccaatcatacaaatactatccaaataaaaat

SEQ ID NO: 184 - protein, 551 aa, Homo sapiens
MRDYDEVIAFLGEWGPFQRLIFFLLSASIIPNGFNGMSVVFLAGTPEHRCRVPDAANLSSAWRNNSVPLRLRDGREVPHSCSRYRLATIANFSALGLEPGRDVDLGQLEQESCLDGWEFSQDVYLSTVVTEWNLVCEDNWKVPLTTSLFFVGVLLGSFVSGQLSDRFGRKNVLFATMAVQTGFSFLQIFSISWEMFTVLFVIVGMGQISNYVVAFILGTEILGKSVRIIFSTLGVCTFFAVGYMLLPLFAYFIRDWRMLLLALTVPGVLCVPLWWFIPESPRWLISQRRFREAEDIIQKAAKMNNTAVPAVIFDSVEELNPLKQQKAFILDLFRTRNIAIMTIMSLLLWMLTSVGYFALSLDAPNLHGDAYLNCFLSALIEIPAYITAWLLLRTLPRRYIIAAVLFWGGGVLLFIQLVPVDYYFLSIGLVMLGKFGITSAFSMLYVFTAELYPTLVRNMAVGVTSTASRVGSIIAPYFVYLGAYNRMLPYIVMGSLTVLIGIFTLFFPESLGMTLPETLEQMQKVKWFRSGKKTRDSMETEENPKVLITAF

SEQ ID NO: 185 - DNA, 2168 bp, Homo sapiens
gcgagtgtccagctgcggagacccgtgataattcgttaactaattcaacaaacgggacccttctgtgtgccagaaaccgcaagcagttgctaacccagtgggacaggcggattggaagagcgggaaggtcctggcccagagcagtgtgacacttccctctgtgaccatgaaactctgggtgtctgcattgctgatggcctggtttggtgtcctgagctgtgtgcaggccgaattcttcacctctattgggcacatgactgacctgatttatgcagagaaagagctggtgcagtctctgaaagagtacatccttgtggaggaagccaagctttccaagattaagagctgggccaacaaaatggaagccttgactagcaagtcagctgctgatgctgagggctacctggctcaccctgtgaatgcctacaaactggtgaagcggctaaacacagactggcctgcgctggaggaccttgtcctgcaggactcagctgcaggttttatcgccaacctctctgtgcagcggcagttcttccccactgatgaggacgagataggagctgccaaagccctgatgagacttcaggacacatacaggctggacccaggcacaatttccagaggggaacttccaggaaccaagtaccaggcaatgctgagtgtggatgactgctttgggatgggccgctcggcctacaatgaaggggactattatcatacggtgttgtggatggagcaggtgctaaagcagcttgatgccggggaggaggccaccacaaccaagtcacaggtgctggactacctcagctatgctgtcttccagttgggtgatctgcaccgtgccctggagctcacccgccgcctgctctcccttgacccaagccacgaacgagctggagggaatctgcggtactttgagcagttattggaggaagagagagaaaaaacgttaacaaatcagacagaagctgagctagcaaccccagaaggcatctatgagaggcctgtggactacctgcctgagagggatgtttacgagagcctctgtcgtggggagggtgtcaaactgacaccccgtagacagaagaggcttttctgtaggtaccaccatggcaacagggccccacagctgctcattgcccccttcaaagaggaggacgagtgggacagcccgcacatcgtcaggtactacgatgtcatgtctgatgaggaaatcgagaggatcaaggagatcgcaaaacctaaacttgcacgagccaccgttcgtgatcccaagacaggagtcctcactgtcgccagctaccgggtttccaaaagctcctggctagaggaagatgatgaccctgttgtggcccgagtaaatcgtcggatgcagcatatcacagggttaacagtaaagactgcagaattgttacaggttgcaaattatggagtgggaggacagtatgaaccgcacttcgacttctctaggcgaccttttgacagcggcctcaaaacagaggggaataggttagcgacgtttcttaactacatgagtgatgtagaagctggtggtgccaccgtcttccctgatctgggggctgcaatttggcctaagaagggtacagctgtgttctggtacaacctcttgcggagcggggaaggtgactaccgaacaagacatgctgcctgccctgtgcttgtgggctgcaagtgggtctccaataagtggttccatgaacgaggacaggagttcttgagaccttgtggatcaacagaagttgactgacatccttttctgtccttccccttcctggtccttcagcccatgtcaacgtgacagacacctttgtatgttcctttgtatgttcctatcaggctgatttttggagaaatgaatgtttgtctggagcagagggagaccatactagggcgactcctgtgtgactgaagtcccagcccttccattcagcctgtgccatccctggccccaaggctaggatcaaagtggctgcagcagagttagctgtctagcgcctagcaaggtgcctttgtacctcaggtgttttaggtgtgagatgtttcagtgaaccaaagttctgataccttgtttacatgtttgtttttatggcatttctatctattgtggctttaccaaaaaataaaatgtccctaccagaaaaaaaaaa

SEQ ID NO: 186 - protein, 533 aa, Homo sapiens
MKLWVSALLMAWFGVLSCVQAEFFTSIGHMTDLIYAEKELVQSLKEYILVEEAKLSKIKSWANKMEALTSKSAADAEGYLAHPVNAYKLVKRLNTDWPALEDLVLQDSAAGFIANLSVQRQFFPTDEDEIGAAKALMRLQDTYRLDPGTISRGELPGTKYQAMLSVDDCFGMGRSAYNEGDYYHTVLWMEQVLKQLDAGEEATTTKSQVLDYLSYAVFQLGDLHRALELTRRLLSLDPSHERAGGNLRYFEQLLEEEREKTLTNQTEAELATPEGIYERPVDYLPERDVYESLCRGEGVKLTPRRQKRLFCRYHHGNRAPQLLIAPFKEEDEWDSPHIVRYYDVMSDEEIERIKEIAKPKLARATVRDPKTGVLTVASYRVSKSSWLEEDDDPVVARVNRRMQHITGLTVKTAELLQVANYGVGGQYEPHFDFSRRPFDSGLKTEGNRLATFLNYMSDVEAGGATVFPDLGAAIWPKKGTAVFWYNLLRSGEGDYRTRHAACPVLVGCKWVSNKWFHERGQEFLRPCGSTEVD

SEQ ID NO: 187 - DNA, 735 bp, Homo sapiens
gcagccagaaagctctggagcatcagggagactccaacttaaggcaacagcatgggtgaataagggcttcctgtggactggcaatgagaggcaaaacctggtgcttgagcactggcccctaaggcaggccttacagatctcttacactcgtggtgggaagagtttagtgtgaaactggggtggaattgggtgtccacgtatgttcccttttgccttactatatgttctgtcagtttctttcaggaaaatcttcatcttacaacttgtagggctggtgttaacttacgacttcactaactgtgactttgagaagattaaagcagcctatctcagtactatttctaaagacctgattacatatatgagtgggaccaaaagtaccgagttcaacaacaccgtctcttgtagcaatcggccacattgccttactgaaatccagagcctaaccttcaatcccaccgccggctgcgcgtcgctcgccaaagaaatgttcgccatgaaaactaaggctgccttagctatctggtgcccaggctattcggaaactcagataaatgctactcaggcaatgaagaagaggagaaaaaggaaagtcacaaccaataaatgtctggaacaagtgtcacaattacaaggattgtggcgtcgcttcaatcgacctttactgaaacaacagtaaaccatctttattatggtcatatttcacagcaccaaaataaatcatctttattaagt

SEQ ID NO: 188 - protein, 159 aa, Homo sapiens
MFPFALLYVLSVSFRKIFILQLVGLVLTYDFTNCDFEKIKAAYLSTISKDLITYMSGTKSTEFNNTVSCSNRPHCLTEIQSLTFNPTAGCASLAKEMFAMKTKAALAIWCPGYSETQINATQAMKKRRKRKVTTNKCLEQVSQLQGLWRRFNRPLLKQQ

SEQ ID NO: 189 - DNA, 1677 bp, Homo sapiens
aggttctcttacatcgaccgcctaagagtcgcgctgtaagaagcaacaacctctcctcttcgtctccgccatcagctcggcagtcgcgaagcagcaaccatgcgtgagtgcatctccatccacgttggccaggctggtgtccagattggcaatgcctgctgggagctctactgcctggaacacggcatccagcccgatggccagatgccaagtgacaagaccattgggggaggagatgattccttcaacaccttcttcagtgagacgggggctggcaagcatgtgccccgggcagtgtttgtagacttggaacccacagtcattgatgaagttcgcactggcacctaccgccagctcttccaccctgagcaacttatcacaggcaaagaagatgctgccaataactatgcccgagggcactacaccattggcaaggagatcattgacctcgtgttggaccgaattcgcaagctggccgaccagtgcacgggtctccagggcttcttggttttccacagctttggtgggggaactggttctgggttcacctcgctgctcatggaacgtctctcagttgattatggcaagaagtccaagctggagttctctatttacccggcgccccaggtttccacagctgtagttgagccctacaactccatcctcaccacccacaccaccctggagcactctgattgtgccttcatggtagacaatgaggccatctatgacatctgtcgtagaaacctcgatattgagcgtccaacctatactaacctgaataggttaataggtcaaattgtgtcctccatcactgcttccctgagatttgatggagccctgaatgttgacctgacagaattccagaccaacctggtgccctatccccgcatccacttccctctggccacatatgcccctgtcatctctgctgagaaagcctaccatgaacagctttctgtagcagagatcaccaatgcttgctttgagccagccaaccagatggtgaaatgtgaccctcgccatggtaaatacatggcttgctgcctgttgtaccgtggtgacgtggttcccaaagatgtcaatgctgccattgccaccatcaagaccaagcgtaccatccagtttgtggattggtgccccactggcttcaaggttggcatcaactaccagcctcccactgtggtgcctggtggagacctggccaaggtacagagagctgtgtgcatgctgagcaacaccacagccattgctgaggcctgggctcgcctggaccacaagtttgacctgatgtatgccaaacgtgcctttgttcactggtacgttggggaggggatggaggaaggtgagttttcagaggcccgtgaggacatggctgcccttgagaaggattatgaggaggttggtgtggattctgttgaaggagagggtgaggaagaaggagaggaatactaaagttaaaacgtcacaaaggtgctgcttttacagggaagcttattctgttttaaacattgaaaagttgtggtctgatcagttaatttgtatgtagcagtgtatgctctcatatacaattactgacctatgctctaaaacatgaatgctttgttacagacccaagctgtccatttctgtgatgggttttgaataaagtattccctgtcttaaaaaaaaaaaaaa

SEQ ID NO: 190 - protein, 451 aa, Homo sapiens
MRECISIHVGQAGVQIGNACWELYCLEHGIQPDGQMPSDKTIGGGDDSFNTFFSETGAGKHVPRAVFVDLEPTVIDEVRTGTYRQLFHPEQLITGKEDAANNYARGHYTIGKEIIDLVLDRIRKLADQCTGLQGFLVFHSFGGGTGSGFTSLLMERLSVDYGKKSKLEFSIYPAPQVSTAVVEPYNSILTTHTTLEHSDCAFMVDNEAIYDICRRNLDIERPTYTNLNRLIGQIVSSITASLRFDGALNVDLTEFQTNLVPYPRIHFPLATYAPVISAEKAYHEQLSVAEITNACFEPANQMVKCDPRHGKYMACCLLYRGDVVPKDVNAAIATIKTKRTIQFVDWCPTGFKVGINYQPPTVVPGGDLAKVQRAVCMLSNTTAIAEAWARLDHKFDLMYAKRAFVHWYVGEGMEEGEFSEAREDMAALEKDYEEVGVDSVEGEGEEEGEEY

SEQ ID NO: 191 - DNA, 1558 bp, Homo sapiens
cttggtagtctgttagtgggagatccttgttgccgtcccttcgcctccttcaccgccgcagaccccttcaagttctagtcatgcgtgagtgcatctccatccacgttggccaggctggtgtccagattggcaatgcctgctgggagctctactgcctggaacacggcatccagcccgatggccagatgccaagtgacaagaccattgggggaggagatgattccttcaacaccttcttcagtgaaacgggtgctggcaagcatgtgccccgggcagtgtttgtagacttggaacccacagtcattgatgaagttcgcactggcacctaccgccagctcttccaccctgagcagctcatcacaggcaaggaagatgctgccaataactatgcccgagggcactacaccattggcaaggagatcattgacctcgtgttggaccgaattcgcaagctggctgaccagtgcaccggtcttcagggcttcttggttttccacagctttggtgggggaactggttctgggttcacctcgctgctcatggaacgtctctcagttgattatggcaagaagtccaagctggagttctctatttacccggcgccccaggtttccacagctgtagttgagccctacaactccatcctcaccacccacaccaccctggagcactctgattgtgccttcatggtagacaatgaggccatctatgacatctgtcgtagaaacctcgatatcgagcgcccaacctacactaaccttaaccgccttattagccagattgtgtcctccatcactgcttccctgagatttgatggagccctgaatgttgacctgacagaattccagaccaacctggtgccctacccccgcatccacttccctctggccacatatgcccctgtcatctctgctgagaaagcctaccatgaacagcttactgtagcagagatcaccaatgcttgctttgagccagccaaccagatggtgaaatgtgaccctcgccatggtaaatacatggcttgctgcctgttataccgtggtgacgtggttcccaaagatgtcaatgctgccattgccaccatcaaaaccaagcgtaccatccagtttgtggattggtgccccactggcttcaaggttggcattaattaccagcctcccactgtggtgcctggcggagacctggccaaggtacagagagctgtgtgcatgctgagcaataccacagctgttgctgaggcctgggctcgcctggaccacaagtttgacctgatgtatgccaagcgtgcctttgttcactggtacgtgggtgaggggatggaggaaggcgagttttcagaggcccgtgaggacatggctgcccttgagaaggattatgaggaggttggagcagatagtgctgacggagaggatgagggtgaagagtattaacctgtgtgctgtacttttacactcctttgtcttggaactgtcttatttttgttctgtaaatgtctattgccgtaaattgttaataaaattgatgtttccattttaaaaaaaaaaaaaaaaaaaaaaaa

SEQ ID NO: 192 - protein, 449 aa, Homo sapiens
MRECISIHVGQAGVQIGNACWELYCLEHGIQPDGQMPSDKTIGGGDDSFNTFFSETGAGKHVPRAVFVDLEPTVIDEVRTGTYRQLFHPEQLITGKEDAANNYARGHYTIGKEIIDLVLDRIRKLADQCTGLQGFLVFHSFGGGTGSGFTSLLMERLSVDYGKKSKLEFSIYPAPQVSTAVVEPYNSILTTHTTLEHSDCAFMVDNEAIYDICRRNLDIERPTYTNLNRLISQIVSSITASLRFDGALNVDLTEFQTNLVPYPRIHFPLATYAPVISAEKAYHEQLTVAEITNACFEPANQMVKCDPRHGKYMACCLLYRGDVVPKDVNAAIATIKTKRTIQFVDWCPTGFKVGINYQPPTVVPGGDLAKVQRAVCMLSNTTAVAEAWARLDHKFDLMYAKRAFVHWYVGEGMEEGEFSEAREDMAALEKDYEEVGADSADGEDEGEEY

SEQ ID NO: 193 - DNA, 1143 bp, Homo sapiens
gaatgtctctctaccccccaaccccccatgtctgtggtgaagtcgatcgaattagtgctgcccgaggatagaatctacctggctggctccagcataaaagggcaggtgatcttaaccctgaacagcaccctggtggaccccatagtgaaggtggagctcgtgggaaggggttacgtcgaatggagtgaagaagccggggcatcctgtgattatagcagaaatgttatttgcaacaacaaggcagactacgtgcataagacaaagacattcccagtggaggataattggttaagtgcaggcagccacacctttgacttccatttcaacttacctcccaggcttccttctaccttcaccagcaaatttggccatgtcttctatttcgtacaagcttcctgcatgggcagggaacacattttagccaagaagaggatgtacttattggttcaaggaacttccaccttccacaaagaaaccccattccaggtaccgatgggggaaaggtggaggtgggaacaatctccaagctccaaggaggaagagggaaggagaggagggggagctccagctgctcctgaaaaggctgaagagaagccagaggcagaaaagtgggagaaccccttgttcgtggaggctgaggagaaagtctcctacaactgctgccgccagggcactgtctgtttgcaaatccagatggaaaggaacaccttcacgccaggagagaaggtcgtcttcacaacagagatcaacaaccagaccagcaaatgcatcaagacggtcgtattcgccctgtatgcccacatacagtacgagggcttcacgcccagtgcagagcggcggtctcggctggacagcagcgagcttctgaggcaggaggccaacacccccgtgacccgcttcaacaccaccaaggttgtcagcaccttcaacctgccgttgctgctgtccgtgagcagcagcacgcaggacggtgagatcatgcacactcgctacgagctggtcaccaccgtgcacctgccctggtccctgaccagcctcaaggccaaagttcccatcatcatcaccagcgcctcagtggactctgccatctgccagctgtcagaggacggagtgttacccgtgaacccagatcaccagaattaa

SEQ ID NO: 194 - protein, 342 aa, Homo sapiens
MGDREECLSTPQPPMSVVKSIELVLPEDRIYLAGSSIKGQVILTLNSTLVDPIVKVELVGRGYVEWSEEAGASCDYSRNVICNNKADYVHKTKTFPVEDNWLSAGSHTFDFHFNLPPRLPSTFTSKFGHVFYFVQASCMGREHILAKKRMYLLVQGTSTFHKETPFQNPLFVEAEEKVSYNCCRQGTVCLQIQMERNTFTPGEKVVFTTEINNQTSKCIKTVVFALYAHIQYEGFTPSAERRSRLDSSELLRQEANTPVTRFNTTKVVSTFNLPLLLSVSSSTQDGEIMHTRYELVTTVHLPWSLTSLKAKVPIIITSASVDSAICQLSEDGVLPVNPDHQN

SEQ ID NO: 195 - DNA, 1068 bp, Homo sapiens
atggatttcatctttcatgagaaacaggaaggtttcctgtgtgctcagcactgtctgaacaatctattgcaaggagaatattttagccctgtggaattagcctcaattgcacatcagctagatgaagaagagaggatgagaatggcagaaggaggagtcaccagtgaagagtatcttgcatttttacagcagccttcagaaaacatggatgataccggtttcttctccattcaggtaataagcaatgccttgaagttctggggtttagagatcatccatttcaataatcctgaatatcagaagctcggcattgatcctataaatgaaagatcttttatatgtaattataaacaacactggtttactattagaaaatttggaaaacactggtttaacttgaattctctcttggcgggtccagaattaatatcagatacatgccttgcaaatttcttggctcgattacaacaacaagcatattctgtatttgttgtcaagggtgatctgccagactgtgaagctgaccaactcctgcagatcatcagtgtcgaagagatggatacaccaaaacttaatggaaaaaaattagtaaaacaaaaagagcatagagtctataaaacagtccttgaaaaagtatcagaagaaagtgatgagtctggaacatcagaccaagatgaggaggattttcagagggcccttgaactaagccgccaagaaaccaatagagaagatgaacatctccgcagtactattgagttaagcatgcaaggtagttccggaaacacatcgcaagatcttccaaagacatcatgtgtaactcctgcttcagaacagccgaagaaaataaaagaagactattttgaaaagcatcagcaggaacagaagcagcagcaacaacagtcagatctgccgggccacagttcatacctacacgaaaggccaacaacaagttcgagagcaattgagagtgatctcagtgatgacatcagtgaaggcacagtacaggccgctgtcgacaccattttagaaattatgagaaagaatttgaaaatcaaaggggaaaaataa

SEQ ID NO: 196 - DNA, 2393 bp, Homo sapiens
cgctgagatctgtggaggtttttctctgcaaatgcagaaagaaatcaggtggatggatgcataattatggccctgctcctggtctctttgctggcattcctgagcttgggctcaggatgtcatcatcggatctgtcactgctctaacagggtttttctctgccaagagagcaaggtgacagagattccttctgacctcccgaggaatgccattgaactgaggtttgtcctcaccaagcttcgagtcatccaaaaaggtgcattttcaggatttggggacctggagaaaatagagatctctcagaatgatgtcttggaggtgatagaggcagatgtgttctccaaccttcccaaattacatgaaattagaattgaaaaggccaacaacctgctctacatcacccctgaggccttccagaaccttcccaaccttcaatatctgttaatatccaacacaggtattaagcaccttccagatgttcacaagattcattctctccaaaaggttttacttgacattcaagataacataaacatccacacaattgaaagaaattctttcgtggggctgagctttgaaagtgtgattctatggctgaataagaatgggattcaagaaatacacaactgtgcattcaatggaacccaactagatgcagtgaatctaagcgataataataatttagaagaattgcctaatgatgttttccacggagcctctggaccagtcattctagatatttcaagaacaaggatccattccctgcctagctatggcttagaaaatcttaagaagctgagggccaggtcgacttacaacttaaaaaagctgcctactctggaaaagcttgtcgccctcatggaagccagcctcacctatcccagccattgctgtgcctttgcaaactggagacggcaaatctctgagcttcatccaatttgcaacaaatctattttaaggcaagaagttgattatatgactcaggctaggggtcagagatcctctctggcagaagacaatgagtccagctacagcagaggatttgacatgacgtacactgagtttgactatgacttatgcaatgaagtggttgacgtgacctgctcccctaagccagatgcattcaacccatgtgaagatatcatggggtacaacatcctcagagtcctgatatggtttatcagcatcctggccatcactgggaacatcatagtgctagtgatcctaactaccagccaatataaactcacagtccccaggttccttatgtgcaacctggcctttgctgatctctgcattggaatctacctgctgctcattgcatcagttgatatccataccaagagccaatatcacaactatgccattgactggcaaactggggcaggctgtgatgctgctggctttttcactgtctttgccagtgagctgtcagtctacactctgacagctatcaccttggaaagatggcataccatcacgcatgccatgcagctggactgcaaggtgcagctccgccatgctgccagtgtcatggtgatgggctggatttttgcttttgcagctgccctctttcccatctttggcatcagcagctacatgaaggtgagcatctgcctgcccatggatattgacagccctttgtcacagctgtatgtcatgtccctccttgtgctcaatgtcctggcctttgtggtcatctgtggctgctatatccacatctacctcacagtgcggaaccccaacatcgtgtcctcctctagtgacaccaggatcgccaagcgcatggccatgctcatcttcactgacttcctctgcatggcacccatttctttctttgccatttctgcctccctcaaggtgcccctcatcactgtgtccaaagcaaagattctgctggttctgtttcaccccatcaactcctgtgccaaccccttcctctatgccatctttaccaaaaactttcgcagagatttcttcattctgctgagcaagtgtggctgctatgaaatgcaagcccaaatttataggacagaaacttcatccactgtccacaacacccatccaaggaatggccactgctcttcagctcccagagtcaccagtggttccacttacatacttgtccctctaagtcatttagcccaaaactaaaacacaatgtgaaaatgtatctgagtattgaatgataattcagtccttgcctttgaagggtatgtcacaaggagctgacagtgcttctacacatttcatctaatttaatattcctggcatacctttaaggtaaattggtcaggaactattaattccatgtgatacattaggaagctgaattattagtaacaacaataataattaaagaatgcaatactgtaaaaaagcggccgcgaatt

SEQ ID NO: 197 - protein, 695 aa, Homo sapiens
MALLLVSLLAFLSLGSGCHHRICHCSNRVFLCQESKVTEIPSDLPRNAIELRFVLTKLRVIQKGAFSGFGDLEKIEISQNDVLEVIEADVFSNLPKLHEIRIEKANNLLYINPEAFQNLPNLQYLLISNTGIKHLPDVHKIHSLQKVLLDIQDNINIHTIERNSFVGLSFESVILWLNKNGIQEIHNCAFNGTQLDELNLSDNNNLEELPNDVFHGASGPVILDISRTRIHSLPSYGLENLKKLRARSTYNLKKLPTLEKLVALMEASLTYPSHCCAFANWRRQISELHPICNKSILRQEVDYMTQARGQRSSLAEDNESSYSRGFDMTYTEFDYDLCNEVVDVTCSPKPDAFNPCEDIMGYNILRVLIWFISILAITGNIIVLVILTTSQYKLTVPRFLMCNLAFADLCIGIYLLLIASVDIHTKSQYHNYAIDWQTGAGCDAAGFFTVFASELSVYTLTAITLERWHTITHAMQLDCKVQLRHAASVMVMGWIFAFAAALFPIFGISSYMKVSICLPMDIDSPLSQLYVMSLLVLNVLAFVVICGCYIHIYLTVRNPNIVSSSSDTRIAKRMAMLIFTDFLCMAPISFFAISASLKVPLITVSKAKILLVLFHPINSCANPFLYAIFTKNFRRDFFILLSKCGCYEMQAQIYRTETSSTVHNTHPRNGHCSSAPRVTSGSTYILVPLSHLAQN

SEQ ID NO: 198 - DNA, 6378 bp, Homo sapiens
cccattactgttggagctacagggagagaaacaggaggagactgcaagagatcatttgggaaggccgtgggcacgctctttactccatgtgtgggacattcattgcggaataacatcggaggagaagtttcccagagctatggggacttcccatccggcgttcctggtcttaggctgtcttctcacagggctgagcctaatcctctgccagctttcattaccctctatccttccaaatgaaaatgaaaaggttgtgcagctgaattcatccttttctctgagatgctttggggagagtgaagtgagctggcagtaccccatgtctgaagaagagagctccgatgtggaaatcagaaatgaagaaaacaacagcggcctttttgtgacggtcttggaagtgagcagtgcctcggcggcccacacagggttgtacacttgctattacaaccacactcagacagaagagaatgagcttgaaggcaggcacatttacatctatgtgccagacccagatgtagcctttgtacctctaggaatgacggattatttagtcatcgtggaggatgatgattctgccattataccttgtcgcacaactgatcccgagactcctgtaaccttacacaacagtgagggggtggtacctgcctcctacgacagcagacagggctttaatgggaccttcactgtagggccctatatctgtgaggccaccgtcaaaggaaagaagttccagaccatcccatttaatgtttatgctttaaaagcaacatcagagctggatctagaaatggaagctcttaaaaccgtgtataagtcaggggaaacgattgtggtcacctgtgctgtttttaacaatgaggtggttgaccttcaatggacttaccctggagaagtgaaaggcaaaggcatcacaatgctggaagaaatcaaagtcccatccatcaaattggtgtacactttgacggtccccgaggccacggtgaaagacagtggagattacgaatgtgctgcccgccaggctaccagggaggtcaaagaaatgaagaaagtcactatttctgtccatgagaaaggtttcattgaaatcaaacccaccttcagccagttggaagctgtcaacctgcatgaagtcaaacattttgttgtagaggtgcgggcctacccacctcccaggatatcctggctgaaaaacaatctgactctgattgaaaatctcactgagatcaccactgatgtggaaaagattcaggaaataaggtatcgaagcaaattaaagctgatccgtgctaaggaagaagacagtggccattatactattgtagctcaaaatgaagatgctgtgaagagctatacttttgaactgttaactcaagttccttcatccattctggacttggtcgatgatcaccatggctcaactgggggacagacggtgaggtgcacagctgaaggcacgccgcttcctgatattgagtggatgatatgcaaagatattaagaaatgtaataatgaaacttcctggactattttggccaacaatgtctcaaacatcatcacggagatccactcccgagacaggagtaccgtggagggccgtgtgactttcgccaaagtggaggagaccatcgccgtgcgatgcctggctaagaatctccttggagctgagaaccgagagctgaagctggtggctcccaccctgcgttctgaactcacggtggctgctgcagtcctggtgctgttggtgattgtgatcatctcacttattgtcctggttgtcatttggaaacagaaaccgaggtatgaaattcgctggagggtcattgaatcaatcagcccggatggacatgaatatatttatgtggacccgatgcagctgccttatgactcaagatgggagtttccaagagatggactagtgcttggtcgggtcttggggtctggagcgtttgggaaggtggttgaaggaacagcctatggattaagccggtcccaacctgtcatgaaagttgcagtgaagatgctaaaacccacggccagatccagtgaaaaacaagctctcatgtctgaactgaagataatgactcacctggggccacatttgaacattgtaaacttgctgggagcctgcaccaagtcaggccccatttacatcatcacagagtattgcttctatggagatttggtcaactatttgcataagaatagggatagcttcctgagccaccacccagagaagccaaagaaagagctggatatctttggattgaaccctgctgatgaaagcacacggagctatgttattttatcttttgaaaacaatggtgactacatggacatgaagcaggctgatactacacagtatgtccccatgctagaaaggaaagaggtttctaaatattccgacatccagagatcactctatgatcgtccagcctcatataagaagaaatctatgttagactcagaagtcaaaaacctcctttcagatgataactcagaaggccttactttattggatttgttgagcttcacctatcaagttgcccgaggaatggagtttttggcttcaaaaaattgtgtccaccgtgatctggctgctcgcaacgtcctcctggcacaaggaaaaattgtgaagatctgtgactttggcctggccagagacatcatgcatgattcgaactatgtgtcgaaaggcagtacctttctgcccgtgaagtggatggctcctgagagcatctttgacaacctctacaccacactgagtgatgtctggtcttatggcattctgctctgggagatcttttcccttggtggcaccccttaccccggcatgatggtggattctactttctacaataagatcaagagtgggtaccggatggccaagcctgaccacgctaccagtgaagtctacgagatcatggtgaaatgctggaacagtgagccggagaagagaccctccttttaccacctgagtgagattgtggagaatctgctgcctggacaatataaaaagagttatgaaaaaattcacctggacttcctgaagagtgaccatcctgctgtggcacgcatgcgtgtggactcagacaatgcatacattggtgtcacctacaaaaacgaggaagacaagctgaaggactgggagggtggtctggatgagcagagactgagcgctgacagtggctacatcattcctctgcctgacattgaccctgtccctgaggaggaggacctgggcaagaggaacagacacagctcgcagacctctgaagagagtgccattgagacgggttccagcagttccaccttcatcaagagagaggacgagaccattgaagacatcgacatgatggacgacatcggcatagactcttcagacctggtggaagacagcttcctgtaactggcggattcgaggggttccttccacttctggggccacctctggatcccgttcagaaaaccactttattgcaatgcggaggttgagaggaggacttggttgatgtttaaagagaagttcccagccaagggcctcggggagcgttctaaatatgaatgaatgggatattttgaaatgaactttgtcagtgttgcctctcgcaatgcctcagtagcatctcagtggtgtgtgaagtttggagatagatggataagggaataataggccacagaaggtgaactttgtgcttcaaggacattggtgagagtccaacagacacaatttatactgcgacagaacttcagcattgtaattatgtaaataactctaaccaaggctgtgtttagattgtattaactatcttctttggacttctgaagagaccactcaatccatccatgtacttccctcttgaaacctgatgtcagctgctgttgaactttttaaagaagtgcatgaaaaaccatttttgaaccttaaaaggtactggtactatagcattttgctatcttttttagtgttaagagataaagaataataattaaccaaccttgtttaatagatttgggtcatttagaagcctgacaactcattttcatattgtaatctatgtttataatactactactgttatcagtaatgctaaatgtgtaataatgtaacatgatttccctccagagaaagcacaatttaaaacaatccttactaagtaggtgatgagtttgacagtttttgacatttatattaaataacatgtttctctataaagtatggtaatagctttagtgaattaaatttagttgagcatagagaacaaagtaaaagtagtgttgtccaggaagtcagaatttttaactgtactgaataggttccccaatccatcgtattaaaaaacaattaactgccctctgaaataatgggattagaaacaaacaaaactcttaagtcctaaaagttctcaatgtagaggcataaacctgtgctgaacataacttctcatgtatattacccaatggaaaatataatgatcagcaaaaagactggatttgcagaagttttttttttttttcttcatgcctgatgaaagctttggcaaccccaatatatgtattttttgaatctatgaacctgaaaagggtcagaaggatgcccagacatcagcctccttctttcaccccttaccccaaagagaaagagtttgaaactcgagaccataaagatattctttagtggaggctggatgtgcattagcctggatcctcagttctcaaatgtgtgtggcagccaggatgactagatcctgggtttccatccttgagattctgaagtatgaagtctgagggaaaccagagtctgtatttttctaaactccctggctgttctgatcggccagttttcggaaacactgacttaggtttcaggaagttgccatgggaaacaaataatttgaactttggaacagggttggaattcaaccacgcaggaagcctactatttaaatccttggcttcaggttagtgacatttaatgccatctagctagcaattgcgaccttaatttaactttccagtcttagctgaggctgagaaagctaaagtttggttttgacaggttttccaaaagtaaagatgctacttcccactgtatgggggagattgaactttccccgtctcccgtcttctgcctcccactccataccccgccaaggaaaggcatgtacaaaaattatgcaattcagtgttccaagtctctgtgtaaccagctcagtgttttggtggaaaaaacattttaagttttactgataatttgaggttagatgggaggatgaattgtcacatctatccacactgtcaaacaggttggtgtgggttcattggcattctttgcaatactgcttaattgctgataccatatgaatgaaacatgggctgtgattactgcaatcactgtgctatcggcagatgatgctttggaagatgcagaagcaataataaagtacttgactacctactggtgtaatctcaatgcaagccccaactttcttatccaactttttcatagtaagtgcgaagactgagccagattggccaattaaaaacgaaaacctgactaggttctgtagagccaattagacttgaaatacgtttgtgtttctagaatcacagctcaagcattctgtttatcgctcactctcccttgtacagccttattttgttggtgctttgcattttgatattgctgtgagccttgcatgacatcatgaggccggatgaaacttctcagtccagcagtttccagtcctaacaaatgctcccacctgaatttgtatatgactgcatttgtgggtgtgtgtgtgttttcagcaaattccagatttgtttccttttggcctcctgcaaagtctccagaagaaaatttgccaatctttcctactttctatttttatgatgacaatcaaagccggcctgagaaacactatttgtgactttttaaacgattagtgatgtccttaaaatgtggtctgccaatctgtacaaaatggtcctatttttgtgaagagggacataagataaaatgatgttatacatcaatatgtatatatgtatttctatatagacttggagaatactgccaaaacatttatgacaagctgtatcactgccttcgtttatatttttttaactgtgataatccccacaggcacattaactgttgcacttttgaatgtccaaaatttatattttagaaataataaaaagaaagatacttacatgttcccaaaacaatggtgtggtgaatgtgtgagaaaaactaacttgatagggtctaccaatacaaaatgtattacgaatgcccctgttcatgtttttgttttaaaacgtgtaaatgaagatctttatatttcaataaatgatatataatttaaagtt

SEQ ID NO: 199 - protein, 1089 aa, Homo sapiens
MGTSHPAFLVLGCLLTGLSLILCQLSLPSILPNENEKVVQLNSSFSLRCFGESEVSWQYPMSEEESSDVEIRNEENNSGLFVTVLEVSSASAAHTGLYTCYYNHTQTEENELEGRHIYIYVPDPDVAFVPLGMTDYLVIVEDDDSAIIPCRTTDPETPVTLHNSEGVVPASYDSRQGFNGTFTVGPYICEATVKGKKFQTIPFNVYALKATSELDLEMEALKTVYKSGETIVVTCAVFNNEVVDLQWTYPGEVKGKGITMLEEIKVPSIKLVYTLTVPEATVKDSGDYECAARQATREVKEMKKVTISVHEKGFIEIKPTFSQLEAVNLHEVKHFVVEVRAYPPPRISWLKNNLTLIENLTEITTDVEKIQEIRYRSKLKLIRAKEEDSGHYTIVAQNEDAVKSYTFELLTQVPSSILDLVDDHHGSTGGQTVRCTAEGTPLPDIEWMICKDIKKCNNETSWTILANNVSNIITEIHSRDRSTVEGRVTFAKVEETIAVRCLAKNLLGAENRELKLVAPTLRSELTVAAAVLVLLVIVIISLIVLVVIWKQKPRYEIRWRVIESISPDGHEYIYVDPMQLPYDSRWEFPRDGLVLGRVLGSGAFGKVVEGTAYGLSRSQPVMKVAVKMLKPTARSSEKQALMSELKIMTHLGPHLNIVNLLGACTKSGPIYIITEYCFYGDLVNYLHKNRDSFLSHHPEKPKKELDIFGLNPADESTRSYVILSFENNGDYMDMKQADTTQYVPMLERKEVSKYSDIQRSLYDRPASYKKKSMLDSEVKNLLSDDNSEGLTLLDLLSFTYQVARGMEFLASKNCVHRDLAARNVLLAQGKIVKICDFGLARDIMHDSNYVSKGSTFLPVKWMAPESIFDNLYTTLSDVWSYGILLWEIFSLGGTPYPGMMVDSTFYNKIKSGYRMAKPDHATSEVYEIMVKCWNSEPEKRPSFYHLSEIVENLLPGQYKKSYEKIHLDFLKSDHPAVARMRVDSDNAYIGVTYKNEEDKLKDWEGGLDEQRLSADSGYIIPLPDIDPVPEEEDLGKRNRHSSQTSEESAIETGSSSSTFIKREDETIEDIDMMDDIGIDSSDLVEDSFL

SEQ ID NO: 200 - DNA, 2807 bp, Homo sapiens
tgattttgggacccagccatggtccttctgcttcttctttaaaatacccactttctccccatcgccaagcggcgtttggcaatatcagatatccactctatttatttttacctaaggaaaaactccagctcccttcccactcccagctgccttgccacccctcccagccctctgcttgccctccacctggcctgctgggagtcagagcccagcaaaacctgtttagacacatggacaagaatcccagcgctacaaggcacacagtccgcttcttcgtcctcagggttgccagcgcttcctggaagtcctgaagctctcgcagtgcagtgagttcatgcaccttcttgccaagcctcagtctttgggatctggggaggccgcctggttttcctccctccttctgcacgtctgctggggtctcttcctctccaggccttgccgtccccctggcctctcttcccagctcacacatgaagatgcacttgcaaagggctctggtggtcctggccctgctgaactttgccacggtcagcctctctctgtccacttgcaccaccttggacttcggccacatcaagaagaagagggtggaagccattaggggacagatcttgagcaagctcaggctcaccagcccccctgagccaacggtgatgacccacgtcccctatcaggtcctggccctttacaacagcacccgggagctgctggaggagatgcatggggagagggaggaaggctgcacccaggaaaacaccgagtcggaatactatgccaaagaaatccataaattcgacatgatccaggggctggcggagcacaacgaactggctgtctgccctaaaggaattacctccaaggttttccgcttcaatgtgtcctcagtggagaaaaatagaaccaacctattccgagcagaattccgggtcttgcgggtgcccaaccccagctctaagcggaatgagcagaggatcgagctcttccagatccttcggccagatgagcacattgccaaacagcgctatatcggtggcaagaatctgcccacacggggcactgccgagtggctgtcctttgatgtcactgacactgtgcgtgagtggctgttgagaagagagtccaacttaggtctagaaatcagcattcactgtccatgtcacacctttcagcccaatggagatatcctggaaaacattcacgaggtgatggaaatcaaattcaaaggcgtggacaatgaggatgaccatggccgtggagatctggggcgcctcaagaagcagaaggatcaccacaaccctcatctaatcctcatgatgattcccccacaccggctcgacaacccgggccaggggggtcagaggaagaagcgggctttggacaccaattactgcttccgcaacttggaggagaactgctgtgtgcgccccctctacattgacttccgacaggatctgggctggaagtgggtccatgaacctaagggctactatgccaacttctgctcaggcccttgcccatacctccgcagtgcagacacaacccacagcacggtgctgggactgtacaacactctgaaccctgaagcatctgcctcgccttgctgcgtgccccaggacctggagcccctgaccatcctgtactatgttgggaggacccccaaagtggagcagctctccaacatggtggtgaagtcttgtaaatgtagctgagaccccacgtgcgacagagagaggggagagagaaccaccactgcctgactgcccgctcctcgggaaacacacaagcaacaaacctcactgagaggcctggagcccacaaccttcggctccgggcaaatggctgagatggaggtttccttttggaacatttctttcttgctggctctgagaatcacggtggtaaagaaagtgtgggtttggttagaggaaggctgaactcttcagaacacacagactttctgtgacgcagacagaggggatggggatagaggaaagggatggtaagttgagatgttgtgtggcaatgggatttgggctaccctaaagggagaaggaagggcagagaatggctgggtcagggccagactggaagacacttcagatctgaggttggatttgctcattgctgtaccacatctgctctagggaatctggattatgttatacaaggcaagcattttttttttttttttaaagacaggttacgaagacaaagtcccagaattgtatctcatactgtctgggattaagggcaaatctattacttttgcaaactgtcctctacatcaattaacatcgtgggtcactacagggagaaaatccaggtcatgcagttcctggcccatcaactgtattgggccttttggatatgctgaacgcagaagaaagggtggaaatcaaccctctcctgtctgccctctgggtccctcctctcacctctccctcgatcatatttccccttggacacttggttagacgccttccaggtcaggatgcacatttctggattgtggttccatgcagccttggggcattatgggttcttcccccacttcccctccaagaccctgtgttcatttggtgttcctggaagcaggtgctacaacatgtgaggcattcggggaagctgcacatgtgccacacagtgacttggccccagacgcatagactgaggtataaagacaagtatgaatattactctcaaaatctttgtataaataaatatttttggggcatcctggatgatttcatcttctggaatattgtttctagaacagtaaaagccttattctaaaaaaaaaaaaaaaa

SEQ ID NO: 201 - protein, 412 aa, Homo sapiens
MKMHLQRALVVLALLNFATVSLSLSTCTTLDFGHIKKKRVEAIRGQILSKLRLTSPPEPTVMTHVPYQVLALYNSTRELLEEMHGEREEGCTQENTESEYYAKEIHKFDMIQGLAEHNELAVCPKGITSKVFRFNVSSVEKNRTNLFRAEFRVLRVPNPSSKRNEQRIELFQILRPDEHIAKQRYIGGKNLPTRGTAEWLSFDVTDTVREWLLRRESNLGLEISIHCPCHTFQPNGDILENIHEVMEIKFKGVDNEDDHGRGDLGRLKKQKDHHNPHLILMMIPPHRLDNPGQGGQRKKRALDTNYCFRNLEENCCVRPLYIDFRQDLGWKWVHEPKGYYANFCSGPCPYLRSADTTHSTVLGLYNTLNPEASASPCCVPQDLEPLTILYYVGRTPKVEQLSNMVVKSCKCS

SEQ ID NO: 202 - DNA, 2240 bp, Homo sapiens
acttccccgccctcgccccaaaggagcagcagctccttcttgcctctccattgccgccgccgcaccggcggagctcctctctcgcgcgtctctcctccgatggagctcgggcgccgccgacgccgccgctgccccgaaccctgagcggggccgccccggtcggaggaacgcgccgcccagtccgagggcgcagagcgccaggagcacgcggagggctggggcgcgggctccgggaacgagaaagtgcagctctctcgggtcactgggccggcggcggggggactatggctctgaaggacacgggcagcggcggcagcaccatcctgcccattagcgagatggtttcctcgtccagctcgcccggcgcgtcggccgccgccgccccggggccctgcgcaccctcgcccttccctgaagtagtggagctgaacgtaggcggccaggtttatgtgaccaagcactcgacgctgctcagcgtcccggacagtactttggccagcatgttctcgccctctagtccccgtggcggcgcccggcgccggggcgagctgcccagggacagccgggcgcgcttcttcatcgaccgggacggcttccttttcaggtacgtgctggattatctgcgggacaagcaactcgcgctgccggagcacttccccgagaaggagcggctgctgcgcgaggccgagtatttccagctcaccgacttggtcaagctgctgtcgcccaaggtcaccaagcagaactctctcaacgacgagggctgccagagcgacctggaggacaacgtctcgcagggtagcagcgacgcgctgctgctgcgcggggcggcggccgccgtgccctcgggcccgggagcgcacggtggtggcggcggcggcggcgcgcaggacaagcgctcgggcttcctcacgctgggctaccggggctcctacaccaccgtgcgcgacaaccaggccgacgccaaattccggcgtgtggcgcgcatcatggtgtgcgggcgcatcgcgctggccaaggaggtcttcggggacacgctcaacgagagccgcgaccccgaccggcagccggagaagtacacgtcccgcttctacctcaagttcacctacttggagcaggcctttgatcgcctgtccgaggccggcttccacatggtggcgtgtaactcctcgggcaccgccgccttcgtcaaccagtaccgcgacgacaagatctggagcagctacaccgagtacattttcttccgaccacctcagaaaatagtatcacctaaacaagaacatgaagataggaaacatgacaaagtcactgataaaggaagtgaaagtgggacttcctgtaatgagctctccacttccagttgtgacagccattcagaggcaagcactccccaggacaacccatccagtgcccagcaggcaacagctcaccaacctaacactttaacattggatcgcccctctaaaaaagcacctgtacaatggatacccccaccagacaaacgcagaaacagtgaactctttcagaccctcatcagcaagtcccgggaaacaaatctgtccaaaaagaaagtctgtgagaagctaagtgtggaagaagaaatgaaaaagtgtattcaggattttaaaaaaatccacattccagattattttccagagcgcaaacgccaatggcaatctgaactgttgcagaagtatgggttatagtaattgtcacattcctgcagtattttgatgacattcaatgtttactacagtgtcaccacctgactgatgtcctaacaatggtcagtgtgattcttgctgctcttccttgttgtgaacagtggatgtgggacagtattttcttttatgttttagttgttgttctttttagaaacatgattaaaaaggaaaaaatattaaatcaataagtgttaaatcaaaatggaatatctgattcaaaccattttacaagaatgaaagtaaaatgtgcatgatcaagcttagtatcttggtttttgaactctggtcaactggatatgtttgtcattttgtaacttaccaaaaacaaaccatcatatcataccaactaaaatgatatatggatgaagcaacatcaagtaaaattttagacgatggctataggacccaaatctaaagctgtctaaatgttaattcaatgaaacaagtattatttttgcatgaatacaatgttacaaataaatcacaagaaatagggaagatctgtttgttgcttgg

SEQ ID NO: 203 - protein, 473 aa, Homo sapiens
MALKDTGSGGSTILPISEMVSSSSSPGASAAAAPGPCAPSPFPEVVELNVGGQVYVTKHSTLLSVPDSTLASMFSPSSPRGGARRRGELPRDSRARFFIDRDGFLFRYVLDYLRDKQLALPEHFPEKERLLREAEYFQLTDLVKLLSPKVTKQNSLNDEGCQSDLEDNVSQGSSDALLLRGAAAAVPSGPGAHGGGGGGGAQDKRSGFLTLGYRGSYTTVRDNQADAKFRRVARIMVCGRIALAKEVFGDTLNESRDPDRQPEKYTSRFYLKFTYLEQAFDRLSEAGFHMVACNSSGTAAFVNQYRDDKIWSSYTEYIFFRPPQKIVSPKQEHEDRKHDKVTDKGSESGTSCNELSTSSCDSHSEASTPQDNPSSAQQATAHQPNTLTLDRPSKKAPVQWIPPPDKRRNSELFQTLISKSRETNLSKKKVCEKLSVEEEMKKCIQDFKKIHIPDYFPERKRQWQSELLQKYGL

SEQ ID NO: 204 - DNA, 2983 bp, Homo sapiens
agagatagagtcttccctggcattgcaggagagaatctgaagggatgatggatgcatcaaaagagctgcaagttctccacattgacttcttgaatcaggacaacgccgtttctcaccacacatgggagttccaaacgagcagtcctgtgttccggcgaggacaggtgtttcacctgcggctggtgctgaaccagcccctacaatcctaccaccaactgaaactggaattcagcacagggccgaatcctagcatcgccaaacacaccctggtggtgctcgacccgaggacgccctcagaccactacaactggcaggcaacccttcaaaatgagtctggcaaagaggtcacagtggctgtcaccagttcccccaatgccatcctgggcaagtaccaactaaacgtgaaaactggaaaccacatccttaagtctgaagaaaacatcctataccttctcttcaacccatggtgtaaagaggacatggttttcatgcctgatgaggacgagcgcaaagagtacatcctcaatgacacgggctgccattacgtgggggctgccagaagtatcaaatgcaaaccctggaactttggtcagtttgagaaaaatgtcctggactgctgcatttccctgctgactgagagctccctcaagcccacagataggagggaccccgtgctggtgtgcagggccatgtgtgctatgatgagctttgagaaaggccagggcgtgctcattgggaattggactggggactatgaaggtggcacagccccatacaagtggacaggcagtgccccgatcctgcagcagtactacaacacgaagcaggctgtgtgctttggccagtgctgggtgtttgctgggatcctgactacagtgctgagagcgttgggcatcccagcacgcagtgtgacaggcttcgattcagctcacgacacagaaaggaacctcacggtggacacctatgtgaatgagaatggcaagaaaatcaccagtatgacccacgactctgtctggaatttccatgtgtggacggatgcctggatgaagcgaccggatctgcccaagggctacgacggctggcaggctgtggacgcaacgccgcaggagcgaagccagggtgtcttctgctgtgggccatcaccactgaccgccatccgcaaaggtgacatctttattgtctatgacaccagattcgtcttctcagaagtgaatggtgacaggctcatctggttggtgaagatggtgaatgggcaggaggagttacacgtaatttcaatggagaccacaagcatcgggaaaaacatcagcaccaaggcagtgggccaagacaggcggagagatatcacctatgagtacaagtatccagaaggctcctctgaggagaggcaggtcatggatcatgccttcctccttctcagttctgagagggagcacagacgacctgtaaaagagaactttcttcacatgtcggtacaatcagatgatgtgctgctgggaaactctgttaatttcaccgtgattcttaaaaggaagaccgctgccctacagaatgtcaacatcttgggctcctttgaactacagttgtacactggcaagaagatggcaaaactgtgtgacctcaataagacctcgcagatccaaggtcaagtatcagaagtgactctgaccttggactccaagacctacatcaacagcctggctatattagatgatgagccagttatcagaggtttcatcattgcggaaattgtggagtctaaggaaatcatggcctctgaagtattcacgtctttccagtaccctgagttctctatagagttgcctaacacaggcagaattggccagctacttgtctgcaattgtatcttcaagaataccctggccatccctttgactgacgtcaagttctctttggaaagcctgggcatctcctcactacagacctctgaccatgggacggtgcagcctggtgagaccatccaatcccaaataaaatgcaccccaataaaaactggacccaagaaatttatcgtcaagttaagttccaaacaagtgaaagagattaatgctcagaagattgttctcatcaccaagtagccttgtctgatgctgtggagccttagttgagatttcagcatttcctaccttgtgcttagctttcagattatggatgattaaatttgatgacttatatgagggcagattcaagagccagcaggtcaaaaaggccaacacaaccataagcagccagacccacaaggccaggtcctgtgctatcacagggtcacctcttttacagttagaaacaccagccgaggccacagaatcccatccctttcctgagtcatggcctcaaaaatcagggccaccattgtctcaattcaaatccatagatttcgaagccacagagtctctccctggagcagcagactatgggcagcccagtgctgccacctgctgacgacccttgagaagctgccatatcttcaggccatgggttcaccagccctgaaggcacctgtcaactggagtgctctctcagcactgggatgggcctgatagaagtgcattctcctcctattgcctccattctcctctctctatccctgaaatccaggaagtccctctcctggtgctccaagcagtttgaagcccaatctgcaaggacatttctcaagggccatgtggttttgcagacaaccctgtcctcaggcctgaactcaccatagagacccatgtcagcaaacggtgaccagcaaatcctcttcccttattctaaagctgccccttgggagactccagggagaaggcattgcttcctccctggtgtgaactctttctttggtattccatccactatcctggcaactcaaggctgcttctgttaactgaagcctgctccttcttgttctgccctccagagatttgctcaaatgatcaataagctttaaattaaactctacttcaagaaaaaaaaaccg

SEQ ID NO: 205 - protein, 684 aa, Homo sapiens
MMDASKELQVLHIDFLNQDNAVSHHTWEFQTSSPVFRRGQVFHLRLVLNQPLQSYHQLKLEFSTGPNPSIAKHTLVVLDPRTPSDHYNWQATLQNESGKEVTVAVTSSPNAILGKYQLNVKTGNHILKSEENILYLLFNPWCKEDMVFMPDEDERKEYILNDTGCHYVGAARSIKCKPWNFGQFEKNVLDCCISLLTESSLKPTDRRDPVLVCRAMCAMMSFEKGQGVLIGNWTGDYEGGTAPYKWTGSAPILQQYYNTKQAVCFGQCWVFAGILTTVLRALGIPARSVTGFDSAHDTERNLTVDTYVNENGEKITSMTHDSVWNFHVWTDAWMKRPDLPKGYDGWQAVDATPQERSQGVFCCGPSPLTAIRKGDIFIVYDTRFVFSEVNGDRLIWLVKMVNGQEELHVISMETTSIGKNISTKAVGQDRRRDITYEYKYPEGSSEERQVMDHAFLLLSSEREHRRPVKENFLHMSVQSDDVLLGNSVNFTVILKRKTAALQNVNILGSFELQLYTGKKMAKLCDLNKTSQIQGQVSEVTLTLDSKTYINSLAILDDEPVIRGFIIAEIVESKEIMASEVFTSFQYPEFSIELPNTGRIGQLLVCNCIFKNTLAIPLTDVKFSLESLGISSLQTSDHGTVQPGETIQSQIKCTPIKTGPKKFIVKLSSKQVKEINAQKIVLITK

SEQ ID NO: 206 - DNA, 1172 bp, Homo sapiens
agtgaacaccacgagctagcgtgtctacttcacaggccaggtcgtcaactcaactgtcaaggtgtccattgtaccagctgggccatggatccctcccgcctgaaatctgactccacctgccaagagtctgagcctgcaggcctagatttcgactctgctggccaagattatttctctgcagcccaataattcgactctttctaccaagaattggacctggactctcttaacgaagatcttctttcccagtccatgccacatgccaggacagagacctctgtgggcacatatgaatcccactcgacttctgaactggaggatctgacagagcccgagcaaagagagctcaaaaccaaactcactaaattggaggctgaaattgtaaccctacgccacgtactagcagccaaagagagacgctgtggggaactcaagaggaagttaggcctcaccgccttggtagggctgagacagaatctgtccaagagctggcttgatgttcaggtctccaacacctatgtgaaacagaagacatcagctgctctgtccaccatgggcactctcatctgcaggaagcttggaggcgtgaagaagtcggccacattcagatcttttgaaggaaaccctaaaggagaaggaagcagaatataaccctctggagagctcaagacagtaggaacctggacggtgcttgtttgaattttctgatatctgattttcacacgaatatactttttgtttgttttccttttccattttcaaaatgccaagatctgggagcctctttcactcctctagacacactgcctgagatagaagtttgcatcttattggctgtgggcagagactaggacccttatgggtacatttcagtaatctctcactgcctaaaatggtaatccctccagcctaagaggatgattctgttttgttgactcttgaatgctcccccaacattcctttggttttcctataagcaaaaccaaataccactataaatacaaaagcatctggtaaactgtaaagttactcatgtatcccaaccctccacagatttctgaagacaaagttttgcttggattaaaacaagatgttttactattttgcatgttcgatttttaatttgttgtgtttatcaaccaaaatggctttgtatgctggagaacaagagg

SEQ ID NO: 207 - protein, 132 aa, Homo sapiens
MPHARTETSVGTYESHSTSELEDLTEPEQRELKTKLTKLEAEIVTLRHVLAAKERRCGELKRKLGLTALVGLRQNLSKSWLDVQVSNTYVKQKTSAALSTMGTLICRKLGGVKKSATLRSFEGNPKGEGSRI

SEQ ID NO: 208 - DNA, 2051 bp, Homo sapiens
agttcatcctgagccagctgctgaggcggcggctggggctggggcggctgtggcggcgcctggcaggctccgccagccccctgggagcgggggatgggctccgggcgcggagaaactccctcaacatccatctccatcttcccattcactggagggcaagacaaaagcggagtggagacttggcagcggcgcccggcagctactcagctgcccgtggcacgcatggctcgccgaggaggggccgcctcccgcgcgccctcccttctgccacccttcgcccccgctccccgcagctccgctcgcctgcttggctccggccctggcggcgtctgggccggggtgcgcgaggagcgggtggccgcgtgtccttggagcgctggccttcaggcgcccccggcagtcccgctaagcagagcgcatcccggcggcggcggcggcggcggcgcctcccagccgcgctcccagcctcagggccgcttgggtacttgctctccagcccggcccacgctcctagccgctttccagcgtctcttggggccccttggcgtttctcctccctaccaaccttctgaacaaagttgctggaagaaccaacctggtcgccgggctttgcccggcgaagctggcaaattccgggcaacagagggtcgatggggtaggaggaaggagaagcgagaagtcgctgccaggcatttactgcaatgtgcccggggcgggcgccagctgggcgccgtctctttttggtggtgagttctgtgctggaagagcgtcctcagcagggcagggctccaccaggaggcttcggtggtgaccccagggcaggcagtgcgttgcgtctataaatttaaatagagatggcgagggtagccttggaaattcttaaatcagggttcaccactagtcaggtgaacaggatgacttctcaatttaacaccacttgatcctgggtagtagcttacaacttcatgggaactgccactgcaactctgcacgtccaggagggactttcaagcagctctggagagaaatggcgggttatcaagaacctgttcaatattaaatagagcccattattctgggctttgaattccataatgctcccaaatggatcagcagattaatgaactattcatgcgtttcttggcagaggatggcttttttcccctagcatgtatcacagatcacacttgcttgatgaaactggaaaattgcattgctcatcccatgaatgctttgcattaacttaaacacaacttttacatatcaagacacactgtcccattgatgcagttacacaagaacacatcattaggttgtatccctcaatgctatcttttaatctgactctgcatgtgtgacagaaattaattgccactttcatcagtgtagacaaccaatctgggtaatgcaatgtgaacaagtttttgaaaaagaagaaaaagtttagggaccaaattacccattctctttttcttcagattttctaaaaatcagatttcaagttcgttttctaaattgggaattgttgaaaatagagtgagctcctccccagtacctggtaataaaccaacaatcattatagaacgtttataatggtaaattagattatatgtgtaatgtgcttagcagagtgtctttgtgcatatcgagcacctaacattgttataccgagaacagtaagatgatatatgtccacactgagtgttcatctgaagaccttgatttacaaaatagaagctaccggtttaaatcacctttatttaaatttcctaaaagatatttggtatctttagagaatgaagccccttctgaagacaggaagaaagtcaataatattttgtgcaataaaggtttgaatttgtcaggtttttgtttttttttttttccctacagtgtagcaataaaaatcacatgtcagttcagacagcagcaggaatagctgactggtaagttattattcttccatgcttgctacttccaaaatacgtttgtgaacttctttcaaggcttaaatgaagattaaatcaaaataaagatacaatacttcaatt

SEQ ID NO: 209 - DNA, 3556 bp, Homo sapiens
cgcctcctcctccaccagcaccactccctccggggcaccccggtccctgcagagtccctggccggcgccgcctccgctgcggccccctgaatcccgagcctgcctcgcccaagctggtaggacagaaggacagacagattcctctagcctagcgctccgccgctgctgccttacgcggccccgcgtcgggagaactgggatcgccccaagagcaccgcgaggggtcatctcaggctggctgcatgcctcagctgaagatcccagctcctgtcaatgccacctctctgcttgactgtctccttccagattcgagcaggtatgagctgggaagaatgaaggcagggcatgcccgtgtgccagctctgcacagctggatagctgaggaaagatgtggaggagaagccggggattgtgtggaagtctaagggtgttgtttgccctttgggttccagaagatgcatgccaggaccctgggtggcactgccaggaagcaacagagaggagataaaactcacagcagacagacttgccttaacaacaactcccttgaattaaaacacgcttttcaagaaaacaaattatcagttcgatcagcaaacagcagagaagtttctctcataatggcaaagaagggccgggttgctgaccagtgaaagagcttcagaaaaggagaggggagatgagatggccagaaggagcaagagcaccgtacatccctggacaacctcattctaatgggtcaggggctgggacgtgcattttggagtgcaggagaagtggcaactcacaaatgctagattttcttctagagatgaccaagctgtagttcttaaagcagtggcactagggcagaaaactctcacactttgatgtgcacacacagcccctggggatcttgttgacatgtagattctgattccgtaagtcgggctgagattctgcatttccaacaagctcctagatgaggtccattttgctggtccatgaaacacacttagaataagtagcaaggtataggaggatactgactttgctcagtgatgcttgggcttccgtccaaactaaaataaaacaaaagcagacataaatggcccaattcaacagcctgagaagtttggtgataatgacccaagccctggcctggtgaccaagtggctgctcagagagctctatctccaaactccttcccttcctgcctcccctccaagagtgagtaatgtgccagagttcattggggtctgctgtccccagggaaaggtggcccagttgccaagtgcaagtgtatagaacggcttacctgtgcaaagctatcagccctggacctatgggcctagaaacattacttgccactcactcactcactatcattcattcatttctgcaacaaacacttcctgagcatatgctatacaccaggccctgagctcagctctggggatacaggatgaatggcagattgtgccatcaggaagccgactgcacagtcagcccgctggagcacatatgaaaaacaatacggatgttttgatttattatcatattgatcattatgatggtagcgtatacttttggaaggcttgccatacattaggcattgtgctaagcacattatatggttaatctcatcaatcttcacaacctatgtggcaggtactattattaaacccacttcaaagaggagggaactgaacctcagagagggtaagtgacttgcacaaggacacaagctagtgaggagaggaactgagaggaatggccagacaggccatcagcctctgtccccacatgctgggtctgagtgtctgacggtggacacattcccttcctggagggagagctcctagggagctgatggcagcactgagtctggaatgtgatgggagtgcattagatgacgtgggtgatctgatgagtacagaggcgtcacactgcaatgacttcatgcacatatctccccttgaatgcacagagattcagcagaggccaggagctcaagtttctggcccagtgtccccctcttcccctggggaaagccagggacacactgcctggctttgctacacctttctaggcaaaggcagtatgctctccctctccttggcctccctggctgtccacacatccacacccactcacacacacatgcacatgatcatacacattacacaagcccacatgcccacagacatgctcacactcacactcacatgcatacactgccatacacaacacacatacatacattcacacacacttgcacacacacacacacacacagttctgatggccaatcttttggggctatgttgacactgtgaagcaggtgaaacaaagtctttgccactccctgctttgggcctattatgtttgttttatagtttaactctcaaaagacaactttattttccaaaattattcaggttcccagccaggtgcagtggctcacacctgtaatcccagtactttgggaggccaaggcgggcagatcacctgaggtcaggagtttgagaccagcttggccaacatggtgaaacccagtctctactaaaaatacaaaaattagccagacatggtggcacacacatgtaatcccagctattcgggaggctgaggcaggagaatcgcttgaacccgggaggcggaggttgcagtgggccaagatcgtgccactgcactccagcctgggcaacagagcaagactccatctcaaaaaacaaaaacaaaatcattcaggttctgtaggggaccctcactgtgtcctggattccattccacttttaaagtcccaaacagcttgtatggccacttcccttgacacccaaaccagataggagtcttaaatgacacagagtattgatggtttctttaaaaggaaatccactctcaatgggaagctggataacttcgcatccagatttcatccatcttgggctttggtggctgctgtttgtttttgtgcaggagaatctctcccagccaacgtcgatttcactaacacagtggttaacctttgctctctactcctgcatcaatcttccgcctaccgcatgttgagccatgctgctttctggcattccttttggattttcagtttactacccaactaccagtcctaataacatcagataaaagggcttccgctgtgctgcacttgttttcaaaaactataaatgccatcgacccagagttaagtccagcctcagagagacagaatataaatacccaagtggccctgggccactgagttcctcagacattatgtgctatgggagttccagaaagggggattgcctggttttgagtgcagaaggcttcctggaggaggcgagatttctgatgggcctctgttatgagctaaattgagtccaccccaaaattcagatgttcaaatcctaacctgtagtacctaagcatgtggccttatttggaagcagaagcataacagaggtaattcgttaagatgaggtcacagtggaagagggtggaccccaatctgatacaactcgtgtccttataaaaagcagaaatttgaagacagacacacaagaagatgaag

SEQ ID NO: 210 - DNA, 3132 bp, Homo sapiens
cccgcatctcctgcacatctccacccctgcgcaggaggagatccccaggctgctctctccatctctcctacagctccctgcaaacgagggggaagctgctgagagtccctatcactgctggccttttaatgttgtatgcaaggaggaagagggcgagggataacttggtgctggacaactgacctgcggcccgaagggcctctggggagggggtgcaaaagaggagcggctgggctgggggactccatgcgggggcgatggacagggcggcgctcctgggactggcccgcttgtgcgcgctgtgggcagccctgctcgtgctgttcccctacggagcccaaggaaactggatgtggttgggcattgcctccttcggggttccagagaagctgggctgcgccaatttgccgctgaacagccgccagaaggagctgtgcaagaggaaaccgtacctgctgccgagcatccgagagggcgcccggctgggcattcaggagtgcgggagccagttcagacacgagagatggaactgcatgatcaccgccgccgccactaccgccccgatgggcgccagccccctctttggctacgagctgagcagcggcaccaaagagacagcatttatttatgctgtgatggctgcaggcctggtgcattctgtgaccaggtcatgcagtgcaggcaacatgacagagtgttcctgtgacaccaccttgcagaacggcggctcagcaagtgaaggctggcactgggggggctgctccgatgatgtccagtatggcatgtggttcagcagaaagttcctagatttccccatcggaaacaccacgggcaaagaaaacaaagtactattagcaatgaacctacataacaatgaagctggaaggcaggctgtcgccaagttgatgtcagtagactgccgctgccacggagtttccggctcctgtgctgtgaaaacatgctggaaaaccatgtcttcttttgaaaagattggccatttgttgaaggataaatatgaaaacagtatccagatatcagacaaaacaaagaggaaaatgcgcaggagagaaaaagatcagaggaaaataccaatccataaggatgatctgctctatgttaataagtctcccaactactgtgtagaagataagaaactgggaatcccagggacacaaggcagagaatgcaaccgtacatcagagggtgcagatggctgcaacctcctctgctgtggccgaggttacaacacccatgtggtcaggcacgtggagaggtgtgagtgtaagttcatctggtgctgctatgtccgttgcaggaggtgtgaaagcatgactgatgtccacacttgcaagtaaccactccatccagccttgggcaagatgcctcagcaatatacaatggcattgcaaccagagaggtgcccatccctgtgcagcgctagtaaagttgactcttgcagtggaatccctagaaccttggacctgagagtttcccttacctgatcgacatattttcctttatctgatcaacccatcaatcatgtggatttcttgggattctaatgttgaaaaggtttatattcaccttttgatgatttggggaatatatattgacatacaaggaagataatctgtttcctaagcaagaaataacaggaaagatcccttatgccaggaggcctgccatactcaggataagatccttgaatatggaacttagttacaggactcaataatggtgggtgaacattagtcatttttaaaagacacctcttatagcaataaggagacattaacatgaatctcatttattctctcagtattttaactgaagaaattatactgtttgtgtgtggatagaagatgttgaaaagttaacataagcattgggtgctgacttaccctttcatgtacttccaaagaaaggtaatcaaaaagaatcttcttaagtgatataatatccctaaaaaaatgatcattacagatgtttagtgacaaagaatcaatatgtaaaaagtataatgaatgatttagattttaagtgccttttcactgggagaatctggaaaaacctccataaggtatatagcaatctttgatctttagattcatacttttatcacagatcagtttcaactgttaaaaacccacctctgagatactggggggaggatcctgaaacatgcgggaaaaggagaggtaaacagtggaggtaaaaatataatttcatacattgtaaagaaaagcaccctttaaatgtgtaaagacagtgttttgtaaagaattttgtttaaaaagtttctattttgtaaatacagtacttaagttatatgatttatattaaaacatttattgacaaagcctaagagctaaggcagtaaaattatctcataaataatattagcttattttttttcatactattaatgctatttttttggacatcgaagagaatttaacttagcagttagttatatggatgtgtatttcttgctaaaatgacagttttatatgttatagattaaaatatgttgcaaaatatcaaaaatttgtgttatttcagcagtaagattaattgaattctcttttcacattagttatgcttaactcataaggttattataataaattatattagtaaaagtcttaactggaaaaaagaatctaaatcagaatagtgatcaatttgtggatttgatatcctggatatttattatattttatgtaatgctgcatttctatttgaatgttaagtggtctttcttgtttttaatattcatgcatgtatattcatcatattttacaaggttcctggtaaaaattacagggctctatttaaggatgtattttaatgtaaatgcttatgttttttatgaattgttaaatatttcagtattatatagaaaaaaatagatttttaaaattcagaatggacaaagagaatattcattttcttattaataagataaagaaatgtttccctgccccacagtcttcattctatttctctttaattttattcactgaggcagagaaacaatttttgaaaaagagcaaacccatggaaaatgtctcagatctaatattaaaatcaagactaagcatttaactgtgaaaaaaaaaaaaaaaaaaa

SEQ ID NO: 211 - protein, 365 aa, Homo sapiens
MDRAALLGLARLCALWAALLVLFPYGAQGNWMWLGIASFGVPEKLGCANLPLNSRQKELCKRKPYLLPSIREGARLGIQECGSQFRHERWNCMITAAATTAPMGASPLFGYELSSGTKETAFIYAVMAAGLVHSVTRSCSAGNMTECSCDTTLQNGGSASEGWHWGGCSDDVQYGMWFSRKFLDFPIGNTTGKENKVLLAMNLHNNEAGRQAVAKLMSVDCRCHGVSGSCAVKTCWKTMSSFEKIGHLLKDKYENSIQISDKTKRKMRRREKDQRKIPIHKDDLLYVNKSPNYCVEDKKLGIPGTQGRECNRTSEGADGCNLLCCGRGYNTHVVRHVERCECKFIWCCYVRCRRCESMTDVHTCK

SEQ ID NO: 212 - DNA, 4182 bp, Homo sapiens
  modified_base (4174)..(4174): a, c, t, g, unknown or other
ccagtttccacttttgagaagcaggatgttgaatgtgagtaatgacacaacaggcctataaaatgcggactaaccctcggatgactcatccggtacaatgcagctactatttgtcaaggagactgaactcatactatgggggaaaccacttctcaggcagccagctggttctcaggtcagcaagagacgatccatttttatcggaagctttatagtagcaataatgctaatacccagcactcgggctccacaatgtagaggaaatggcatcgcctggcagtgacagctatattgtgcgtgtcaaggctgtggttatgaccagagatgactccagcgggggatggttcccacaggaaggaggcgggatcagtcgcgtcggggtctgtaaggtcatgcaccccgaaggcaatggacgaagcggctttctcatccatggtgaacgacagaaagacaaactggtggtattggaatgctatgtaagaaaggacttggtctacaccaaagccaatccaacgtttcatcactggaaggtcgataataggaagtttggacttactttccaaagccctgctgatgcccgagcctttgacaggggagtaaggaaagcaatcgaagaccttatagaaggttcaacaacgtcatcttccaccatccataatgaagctgagcttggcgatgatgacgtttttacaacagctacagacagttcttctaattcctctcagaagagagagcaacctactcggacaatctcctctcccacatcctgtgagcaccggaggatttataccctgggccacctccacgactcataccccacagaccactatcacctcgatcagccgatgccaaggccctaccgccaggtgagcttcccggacgacgacgaggagatcgtgcgcatcaacccccgggagaagatctggatgacggggtacgaggattaccggcacgcacccgtcaggggcaagtacccggacccctcggaggacgcggactcctcctacgtgcgcttcgccaagggcgaggtccccaagcatgactacaactacccctacgtggactcctcagactttggcctaggcgaggaccccaaaggccgcgggggcagcgtgatcaagacgcagccctcccggggcaagtcgcggcggcggaaggaggacggagagcgctcgcggtgcgtgtactgcagggacatgttcaaccacgaggagaaccgccggggccactgccaggacgcgcccgactccgtgagaacttgcatccgccgggtgagctgcatgtggtgcgcggacagcatgctctatcactgtatgtcggaccccgagggagactatacagacccttgctcgtgcgatactagcgacgagaagttttgcctccggtggatggctcttattgccttgtctttcctggccccctgtatgtgctgttacctgccccttcgggcctgctaccactgcggagtgatgtgcaggtgctgtggcgggaagcacaaagcggccgcgtgactcagtttccctcccttctccctccatccgcagccacaggggaactcgtctcttacatactctcatcttctcccccgctcccttccactccaaggagcgaggagggcaagcggcctcccagctccctggtacctcgaggcaccattccagccagggacgctgccgggtagactctccactccccctgccgcccacactgcagcagccacatccatacacacacgctcgcacagtgttctgaggaaggaaccttcgccacagactcctgtactattaacaatctgtaaccaagctaactgtctcatccatgtgttgatttcctgtttcctcctcccccgcctcttccagttcaaaggagtctgcaattggaactgctgattttcggtgggttttgtagttgatttttccaagagcgtcgaagactctctttctcttggttcaccttgcctgtcgctagcaagcatctggttcagcggaaatgggatgtgagaatgatgaaacccgacagaagtatctcagcctgcagtcagttattatgtataggaggtgagctagttaacaaacttgtaccacaaaacaatatcgctttaacttttctaaagccaaatttcccatgtaagctgcagtttctatctttagcccatcatcattttctgcccccccaaaatctgttgaaatgattcactgatgcaaaacattcacccgtaatagactgagaattgagccttaacttcagattaacttgtgagaatcaggaaaattccttcaactgcattgcatcctcttggaccagggctagaatggggatttcaggtttctatgagcctccccattacccctaaagtagaacattttttaaattgtgttgccaccacttctaaaaatttagcaatattagaataggatactagtgaagtaagaaattttgcttgttgttttgcaaaccaaatagtttcctcaaacacaaatcagtgttcccacgaacaagttccagttgagaaacactaaggttatggtgaataaaaccatagggagcttcttccccccaacccctggctattttatattaatggggagaggggatttttaaatgtcataaatttgaagagtggtgggttgcattttcttcatgggtttatgttttcgtttcattttggactcaatttcacatcaccaaattcctcatttatacttggggaaaaaacaaggccatatgtaaaaacccttccaatgcctaagtgtctttctcctgcaactccaaacccagactcgccactttgggtgcacaggtggttaggtcagccaactggttctgcctgtcgccttgccacggaggaggcttctaattagctggaaaagagtatttttctaatacgttgcaaggattagccaaatcttcttattgaagaaagaagaaaagtgaagagtggttacctatacctagcatagtacaatcagaacctcgtggagaccaccggggacaggcttgcggacgccggctgttcttcccgccacgatctttctgtggtagcggccagcagaagacatggcctgctccccactccctttccccactccttctttattgcacacaggacaccagtcttcaaggaaagggacttttttccagtctgccaatcatattgggaaagtgctagctgtgctcaccttcatggggctgtttccagctcgtccacaagctcatcgattttctttagtagattaccggtgtaaatacccagtgtgcttatgagtcagttagtagacgtcttcattcattggagtaactggtttaggctttccagtttggaaaaggagcagagagctgtccatctggattgatggaagaaaagagaacctcatccatgcctggagaacatctagaaaaccttcagccagcctccagtgctgtcgagagaccaccttcccccgacccggaggcacttccttggggtctttctctagggtctcttctctacaaagcacaacactaatgttcgtttccttagacctcagttcaagtgcccctatttatttcaataagaacgcacatatcccagctgttttttgtttgtcacctctatttagttgttacctgtttctctcttctttcaccccttgtccttttccacccttttaagagttacgctagcagatcttactccacgtatactttttggtttgtgaaggcatcggttaagggcacaaagacagccatggggacatttatgtaaatacgtctctaattgccacactgcagctgaacagtgtgtagtattttcccagtcagctttgccatactgacgtcaatcatttgagagaaattattcagattttatttttgtatctgtggtaacaaaacattaaccaaaagattttctgtccagaagcctccccgaccccccaagctatttgctcacattaacaaattaaagtgcctgaagcataattcattctttacctgtatactaaaaaccctgttgtattgatttttttataataagcctttttacctctgtgtaaaaaatatatatacaagtgtatgatgtacattttagttcttaacttttttttatggtttctaatatgtatgaccaatgtagccattgctttaaaatgtaccgtgtaaatataaacacatcctatcagaaaagaaaaaatcnagaacgaa

SEQ ID NO: 213 - protein, 418 aa, Homo sapiens
MTEETHPDDDSYIVRVKAVVMTRDDSSGGWFPQEGGGISRVGVCKVMHPEGNGRSGFLIHGERQKDKLVVLECYVRKDLVYTKANPTFHHWKVDNRKFGLTFQSPADARAFDRGVRKAIEDLIEGSTTSSSTIHNEAELGDDDVFTTATDSSSNSSQKREQPTRTISSPTSCEHRRIYTLGHLHDSYPTDHYHLDQPMPRPCRQVSFPDDDEEIVRINPREKIWMTGYEDYRHAPVRGKYPDPSEDADSSYVRFAKGEVPKHDYNYPYVDSSDFGLGEDPKGRGGSVIKTQPSRGKSRRRKEDGERSRCVYCRDMFNHEENRRGHCQDAPDSVRTCIRRVSCMWCADSMLYHCMSDPEGDYTDPCSCDTSDEKFCLRWMALIALSFLAPCMCCYLPLRACYHCGVMCRCCGGKHKAAA

SEQ ID NO: 214 - DNA, 814 bp, Homo sapiens
  modified_base (63)..(63): a, c, t, g, unknown or other
  modified_base (126)..(126): a, c, t, g, unknown or other
  modified_base (128)..(128): a, c, t, g, unknown or other
  modified_base (144)..(144): a, c, t, g, unknown or other
  modified_base (184)..(184): a, c, t, g, unknown or other
  modified_base (204)..(204): a, c, t, g, unknown or other
  modified_base (297)..(297): a, c, t, g, unknown or other
atttcagcacaccaaagaaaattgagctggcaaaagatgaatctttcacaagcagtgatgatnatgaaaatgtagatttagataaaagacttcaatattatagatatccgtggtcaactgtgcatnancctgcaaggagaccantatccatctccagagactggcatggatataagaagaaganccatactattagtgtagganaagacattaattgtgacgtgatgattcacagagacgacaagtatagtatagtgagggccccttctccatgctggataatggtgaagcaagacncatgtaagctcttcctcctctacctcctctacctcagatgcattttggctgggagattgtgcccaagttgtatagagggtaaagcccaactggtatcaaaggttggttagctaatctgtggtcatatgagcatttatcttgcagacacccaagttttgtgcctcaccaggcacaagtttgctgtacttatcaacggtctgtctgtagactcaccaattctcttctcttatgactgcgttataaagcctttagagatgttcttcaacaggattatctaaagacttccttgggttcttgcaggcctcacaaatcttattttcagaataagaccctcctttttgagaagaatttctttcttttagaaaatgccgtagagaaatccaatatcagaatgtctgaacatagtagagaatgtcactttatgtaaacactacatttttctttaaatatttagtttctctcttttttttggtaaacttcaagtactataattaaaataactaagagacataaaaaa

SEQ ID NO: 215 - protein, 202 aa, Homo sapiens
MAEGEEEGGDVLISVGHANVLGYTLREFLQLLQHITIGTVLQIKVYRDFINIPEEWQEIYDLIPEAKFPVTSTPKKIELAKDESFTSSDDNENVDLDKRLQYYRYPWSTVHHPARRPISISRDWHGYKKKNHTISVGKDINCDVMIHRDDKKEVRAPSPYWIMVKQDNESSSSSTSSTSDAFWLEDCAQVEEGKAQLVSKVG

SEQ ID NO: 216 - DNA, 2337 bp, Homo sapiens
agcggaggcggcgcggggacgggcgctgggcggccgcggagctccgggtgccgccgcgtccccagcgccccggccggcccctctgggcggcctgcgggggcggcgcagttgcgaaactgagtgcctgtgtagatcatcctagaatacctgtgtggtgctgtccttcctcaagactacctcattctcactggctcggagactcctgcctgctgagctgactacacagacttagtcttctccactccgtgttcctgcagctagagacatgacctaacaccctgatgaccactctcagggaccttgagtgactggccggtgcaccatggaacttaaagtatgggtggatggagttcagaggattgtttgtggagtcactgaagtcacaacttgccaggaggttgtcatagccttagctcaagcaataggtcgaactggaaggtacacccttatagagaaatggagagatactgaaagacacttagcacctcatgaaaatcctatcatatccttaaacaaatgggggcagtatgctagtgatgtgcagctcattctacgacgaactgggccgtctctcagtgagcgacccacttcagacagtgtggctcgaattcctgaaagaactttatacaggcagagtctgccccccttagctaaactgaggcctcagattgacaaatcaatcaaaaggagggaaccgaaaaggaaatcactgacatttacaggaggtgccaaaggattaatggacatttttggaaaaggtaaagaaactgagtttaagcaaaaggtgctgaataactgcaaaacaacagcagatgagttgaagaagctaatccgtctgcagacagagaagcttcaatccattgagaaacagctggaatctaatgaaatagaaataagattttgggagcaaaagtataattccaaccttgaagaggaaattgtccgtctagagcaaaagatcaaaagaaacgatgtagaaattgaggaggaagaattctgggaaaatgaattacagattgaacaggaaaatgaaaaacagctgaaggatcaacttcaagaaataagacagaaaataacagaatgtgaaaacaaattaaaggactatttggcacagatccggactatggaaagtggtcttgaagcagaaaaattgcaacgggaagttcaagaggcacaggtcaatgaggaagaggttaaaggaaagatcggtaaggtcaaaggggagattgacattcaaggccagcagagtctgaggttggaaaatggcatcaaagctgtggaaagatctcttggacaagccaccaaacgcttacaggacaaagaacaggaactggagcagttgactaaggagttgcggcaagtcaatctccagcagttcatccagcagacagggacaaaagttaccgttttgccagcggagcccattgaaatagaggcctcacatgcagacattgaaagggggatcatcattctttctgataagcaggagtgtaaagattagatatcacaccaaaagctcaggcaagaaaagcaaaaatgaacaagtgggactacattaaacccaaaactcctgcacaacaaaggaaacgatcaccaaaatgaaaaggtggactgtagattgggagaaaatatttgcaaaccgttatctggtaggggtttaatatccaaactatataaggaactcacagaacttaaagaaaacaaataatccaattaaaaatggtcaaaggggctgggcatggtggctcacgcctgtaatctcagcactttgggaggccgaggtgggagaatcacaaggtcaggagactgagaccatcctggctaacaccatgatgggctaacacccatctctactaaaaatacgaaacattagccaggtgtggtggcacgcgcctgtaatcccagctactcgggaggctgaggcagaaggattgcttgaacccgggaggtggaggttgcagtgagccgagatcgcattactgcactccagcctgggtaacagagtgagactccatctcaaaaaaaaaaaaaaaatagatatttttccaaagaagacataaaaacagccaacaggtatatgaaaaagtgctcaacatcactgatcagcagggaaatgcaaatcaaagccacaatgagataccacctcacacctgttaggttacatctgctattgtcaaaaagataagagatagcaagtgtcagcaagggtctggagaaaagggaatttttgtatactgttggtgggaatgtaaatcagtacggctattgtggaaaacagtgtagaggtttctcaaaaaattaaaactatcatacaacccagcaaaaaaaaaaaaaaaa

SEQ ID NO: 217 - protein, 392 aa, Homo sapiens
MELKVWVDGVQRIVCGVTEVTTCQEVVIALAQAIGRTGRYTLIEKWRDTERHLAPHENPIISLNKWGQYASDVQLILRRTGPSLSERPTSDSVARIPERTLYRQSLPPLAKLRPQIDKSIKRREPKRKSLTFTGGAKGLMDIFGKGKETEFKQKVLNNCKTTADELKKLIRLQTEKLQSIEKQLESNEIEIRFWEQKYNSNLEEEIVRLEQKIKRNDVEIEEEEFWENELQIEQENEKQLKDQLQEIRQKITECENKLKDYLAQIRTMESGLEAEKLQREVQEAQVNEEEVKGKIGKVKGEIDIQGQQSLRLENGIKAVERSLGQATKRLQDKEQELEQLTKELRQVNLQQFIQQTGTKVTVLPAEPIEIEASHADIERGIIILSDKQECKD

SEQ ID NO: 218 - DNA, 7604 bp, Homo sapiens
cgtgagtgtctgtgcgttttgatcccgaagctcctcgccgggtcgttacttcagaagagaagacagtgagcgtgggcgaggcgaggcatccagaggccccggcgacccctgctccccagtcctccgccccctcgcgtcgcggccctgggcgggcgccgcgagccggagttccattttaattgctgttaatcatttcagagaagaacactgaactttgaaaaaaatgttggaagccattgacaaaaatcgggccctgcatgcagcagagcgcttgcaaaccaagctgcgagaacgtggggatgtagcaaatgaagacaaactgagccttctgaagtcagtcctgcagagccctctcttcagtcagattctgagccttcagacttctgtacagcagctgaaagaccaggtaaatattgcaacttcagcaacttcaaatattgaatatgcccacgttcctcatctcagcccagctgtgattcctactctgcaaaatgaatcgtttttattatccccaaacaatgggaatctggaagcacttacaggacctggtattccacacattaatgggaaacctgcttgtgatgaatttgatcagcttatcaaaaatatggcccagggtcgccatgtagaagtttttgagctcctcaaacctccatctggaggccttgggtttagtgttgtgggactaagaagtgaaaacagaggagagctgggaatatttgttcaagagatacaagagggcagtgtggcccatagagatggaagattgaaagaaactgatcaaattcttgctatcaatggacaggctcttgatcagacaattacacatcagcaggctatcagcatcctgcagaaagccaaagatactgtccagctagttattgccagaggctcattgcctcagcttgtcagccccatagtttcccgttctccatctgcagccagcacaatttcagctcactctaatccggttcactggcaacacatggaaacgattgaattggtgaatgatggatctggtttgggatttggcatcataggaggaaaagcaactggtgtgatagtaaaaaccattctgcctggaggagtagctgatcagcatgggcgtttatgcagtggagaccacattctaaagattggtgacacagatctagcaggaatgagcagtgagcaagtagcacaagtccttaggcaatgtggaaatagagttaagttgatgattgcaagaggtgccatagaagaacgtacagcacccactgctttgggcatcaccctctcctcatccccaacttcaacaccagagttgcgggttgatgcttctactcagaaaggtgaagaaagtgagacatttgatgtagaactcactaaaaatgtccaaggattaggaattaccattgctggctacattggagataaaaaattggaaccttcaggaatctttgtaaagagcattacaaaaagcagtgccgttgagcatgatggaagaatccaaattggagaccaaattatagcagtagatggcacaaaccttcagggttttactaatcagcaagcagtagaggtattgcgacatacaggacaaactgtgctcctgacactaatgaggagaggaatgaagcaggaagccgagctcatgtcaagggaagacgtcacaaaagatgcagatttgtctcctgttaatgccagcataatcaaagaaaattatgaaaaagatgaagattttttatcttcgacgagaaacaccaacatattaccaactgaagaagaagggtatccattactgtcagctgagatagaagaaatagaagatgcacaaaaacaagaagctgctctgctgacaaaatggcaaaggattatgggaattaactatgaaatagtggtggcccatgtgagcaagtttagtgagaacagtggattggggataagcctggaagcgacagtgggacatcattttatccgatctgttctaccagagggtcctgttggacacagcgggaagctcttcagtggagacgagctattggaagtaaatggcataactttacttggggaaaatcaccaagatgtggtgaatatcttaaaagaactgcctatagaagtgacaatggtgtgctgtcgtcgaactgtgccacccaccacccaatcagaattggatagcctggacttatgtgatattgagctaacagaaaagcctcacgtagatctaggtgagttcatcgggtcatcagagacagaggatccagtgctggcgatgactgatgcgggtcagagtacagaagaggttcaagcacctttggccatgtgggaggctggcattcagcacatagagctggagaaagggagcaaaggacttggttttagcattttagattatcaggatccaattgatccagcaagcactgtgattataattcgttctttggtgcctggcggcattgctgaaaaggatggacgacttcttcctggtgaccgactcatgtttgtaaacgatgttaacttggaaaacagcagtcttgaggaagctgtagaagcactgaagggagcaccgtcagggactgtgagaataggagttgctaagcctttacccctttcaccagaagaaggttatgtttctgctaaggaggattcctttctctacccaccacactcctgtgaggaagcagggctggctgacaaacccctcttcagggctgacttggctctggtgggcacaaatgatgctgacttagtagatgaatccacatttgagtctccatactctcctgaaaatgacagcatctactctactcaagcctctattttatctcttcatggcagttcttgtggtgatggcctgaactatggttcttcccttccatcatctcctcctaaggatgttattgaaaattcttgtgatccagtacttgatctgcatatgtctctggaggaactatatacccagaatctcctgcaaagacaggatgagaatacaccttcggtggacataagtatggggcctgcttctggctttactataaatgactacacacctgcaaatgctattgaacaacaatatgaatgtgaaaacacaatagtgtggactgaatctcatttaccaagtgaagttatatcaagtgcagaacttccttctgtgctacccgattcagctggaaagggctctgagtacctgcttgaacagagctccctggcctgtaatgctgagtgtgtcatgcttcaaaatgtatctaaagaatcttttgaaaggactattaatatagcaaaaggcaattctagcctaggaatgacagttagtgctaataaagatggcttggggatgatcgttcgaagcattattcatggaggtgccattagtcgagatggccggattgccattggggactgcatcttgtccattaatgaagagtctaccatcagtgtaaccaatgcccaggcacgagctatgttgagaagacattctctcattggccctgacataaaaattacttatgtgcctgcagaacatttggaagagttcaaaataagcttgggacaacaatctggaagagtaatggcactggatattttttcttcatacactggcagagacattccagaattaccagagcgagaagagggagagggtgaagaaagcgaacttcaaaacacagcatatagcaattggaatcagcccaggcgggtggaactctggagagaaccaagcaaatccttaggcatcagcattgttggtggacgagggatggggagtcggctaagcaatggagaagtgatgaggggcattttcatcaaacatgttctggaagatagtccagctggcaaaaatggaaccttgaaacctggagatagaatcgtagaggtggatggaatggacctcagagatgcaagccatgaacaagctgtggaagccattcggaaagcaggcaaccctgtagtctttatggtacagagcattataaacagaccaaggaaatcccctttgccttccttgctgcacaacctttaccctaagtacaacttcagcagcactaacccatttgctgactctctacaaatcaacgccgacaaggcacccagtcagtcagagtcagagccagagaaggctccattgtgcagtgtgcccccaccccctccttcagcctttgccgaaatgggtagtgatcacacacagtcatctgcaagcaaaatctcacaagatgtggacaaagaggatgagtttggttacagctggaaaaatatcagagagcgttatggaaccctaacaggcgagctgcatatgattgaactggagaaaggtcatagtggtttgggcctaagtcttgctgggaacaaagaccgatccaggatgagtgtcttcatagtggggattgatccaaatggagctgcaggaaaagatggtcgattgcaaattgcagatgagcttctagagatcaatggtcagattttatatggaagaagtcatcagaatgcctcatcaatcattaaatgtgccccttctaaagtgaaaataatttttatcagaaataaagatgcagtgaatcagatggccgtatgtcctggaaatgcagtagaacctttgccttctaactcagaaaatcttcaaaataaggagacagagccaactgttactacttctgatgcagctgtggacctcagttcatttaaaaatgtgcaacatctggagcttcccaaggatcaggggggtttgggtattgctatcagcgaagaagatacactcagtggagtcatcataaagagcttaacagagcatggggtagcagccacggatggacgactcaaagtcggagatcagatactggctgtagatgatgaaattgttgttggttaccctattgaaaagtttattagccttctgaagacagcaaagatgacagtaaaacttaccatccatgctgagaatccagattcccaggctgttccttcagcagctggtgcagccagtggagaaaaaaagaacagctcccagtctctgatggtcccacagtctggctccccagaaccggagtccatccgaaatacaagcagatcatcaacaccagcaatttttgcttctgatcctgcaacctgccccattatccctggctgcgaaacaaccatcgagatttccaaagggcgaacagggctgggcctgagcatcgttgggggttcagacacgctgctgggtgccattattatccatgaagtttatgaagaaggagcagcatgtaaagatggaagactctgggctggagatcagatcttagaggtgaatggaattgacttgagaaaggccacacatgatgaagcaatcaatgtcctgagacagacgccacagagagtgcgcctgacactctacagagatgaggccccatacaaagaggaggaagtgtgtgacaccctcactattgagctgcagaagaagccgggaaaaggcctaggattaagtattgttggtaaaagaaacgatactggagtatttgtgtcagacattgtcaaaggaggaattgcagatgccgatggaagactgatgcagggagaccagatattaatggtgaatggggaagacgttcgtaatgccacccaagaagcggttgccgctttgctaaaggtgagtgaaggcagcctgtcatctttcacttttccactctctggatccagtacatctgagtcactggaaagtagctcaaagaagaatgcattggcatctgaaatacagggattaagaacagtcgaaatgaaaaagggccctactgactcactgggaatcagcatcgctggaggagtaggcagcccacttggtgatgtgcctatatttattgcaatgatgcacccaactggagttgcagcacagacccaaaaactcagagttggggataggattgtcaccatctgtggcacatccactgagggcatgactcacacccaagcagttaacctactgaaaaatgcatctggctccattgaaatgcaggtggttgctggaggagacgtgagtgtggtcacaggtcatcagcaggagcctgcaagttccagtctttctttcactgggctgacgtcaagcagtatatttcaggatgatttaggacctcctcaatgtaagtctattacactagagcgaggaccagatggcttaggcttcagtatagttggaggatatggcagccctcatggagacttacccatttatgttaaaacagtgtttgcaaagggagcagcctctgaagacggacgtctgaaaaggggcgatcagatcattgctgtcaatgggcagagtctagaaggagtcacccatgaagaagctgttgccatccttaaacggacaaaaggcactgtcactttgatggttctctcttgaattggctgccagaattgaaccaacccaacccctagctcacctcctactgtaaagagaatgcactggtcctgacaatttttatgctgtgttcagccgggtcttcaaaactgtaggggggaaataacacttaagtttctttttctcatctagaaatgctttccttactgacaacctaacatcatttttcttttcttcttgcattttgtgaacttaaagagaaggaatatttgtgtaggtgaatctcgtttttatttgtggagatatctaatgttttgtagtcacatgggcaagaattattacatgctaagctggttagtataaagaaagataattctaaagctaaccaaagaaaatggcttcagtaagttaggatgaaaaatgaaaatataaaataaagaagaaaatctcggggagtttaaaaaaaatgcctcaatttggcaatctacctcctctccccaccccaaactaaaaaaagaaaaaaaggttttctaatgaaaatctttaaaaatactgtcagtattttaaaattttcaacagtattataaaaacattgcatctccccacctctaatatgcatatatatttttcctgctaaaattggtttctacaattgagtaaatggcaaatacatgaagcaatgtccctaaattttataaagaaattatatttaatgcacatttcaattttcattcttatttttgaccttttgtaaaatattttcatgttgctataagtaaatgatgatgccaccccatgttgactatggtttttctagaaagcaactatgctgctaaccatagaggaacatagaagggttccagaatctttagtgctggttttaacaaccgatgcaacattaaaaatgtgttagtgtgctgtgcaattggttttcaattcatattaatcttaatgacagagaacaatgtgttactaattattttggttgtatgccattagtaaattgatagaaaaattaaggggattaacataacttcatttcattgccttatattaacatcttataatacaatagtttaagactaagggaaacagatggagctgtttattgagacaactggtgaggaattatcatgtgttcattcccattttagagcgtgaaactcctacattagaatatataaagtcactttaaatatctatatttgtaacagaagtagtgtacagatattttattacagcatttttgtgtaaatgcagaattaaagtgaataaataagaattttcagtggtgcac

SEQ ID NO: 219 - protein, 2045 aa, Homo sapiens
TLKKMLEAIDKNRALHAAERLQTKLRERGDVANEDKLSLLKSVLQSPLFSQILSLQTSVQQLKDQVNIATSATSNIEYAHVPHLSPAVIPTLQNESFLLSPNNGNLEALTGPGIPHINGKPACDEFDQLIKNMAQGRHVEVFELLKPPSGGLGFSVVGLRSENRGELGIFVQEIQEGSVAHRDGRLKETDQILAINGQALDQTITHQQAISILQKAKDTVQLVIARGSLPQLVSPIVSRSPSAASTISAHSNPVHWQHMETIELVNDGSGLGFGIIGGKATGVIVKTILPGGVADQHGRLCSGDHILKIGDTDLAGMSSEQVAQVLRQCGNRVKLMIARGAIEERTAPTALGITLSSSPTSTPELRVDASTQKGEESETFDVELTKNVQGLGITIAGYIGDKKLEPSGIFVKSITKSSAVEHDGRIQIGDQIIAVDGTNLQGFTNQQAVEVLRHTGQTVLLTLMRRGMKQEAELMSREDVTKDADLSPVNASIIKENYEKDEDFLSSTRNTNILPTEEEGYPLLSAEIEEIEDAQKQEAALLTKWQRIMGINYEIVVAHVSKFSENSGLGISLEATVGHHFIRSVLPEGPVGHSGKLFSGDELLEVNGITLLGENHQDVVNILKELPIEVTMVCCRRTVPPTTQSELDSLDLCDIELTEKPHVDLGEFIGSSETEDPVLAMTDAGQSTEEVQAPLAMWEAGIQHIELEKGSKGLGFSILDYQDPIDPASTVIIIRSLVPGGIAEKDGRLLPGDRLMFVNDVNLENSSLEEAVEALKGAPSGTVRIGVAKPLPLSPEEGYVSAKEDSFLYPPHSCEEAGLADKPLFRADLALVGTNDADLVDESTFESPYSPENDSIYSTQASILSLHGSSCGDGLNYGSSLPSSPPKDVIENSCDPVLDLHMSLEELYTQNLLQRQDENTPSVDISMGPASGFTINDYTPANAIEQQYECENTIVWTESHLPSEVISSAELPSVLPDSAGKGSEYLLEQSSLACNAECVMLQNVSKESFERTINIAKGNSSLGMTVSANKDGLGMIVRSIIHGGAISRDGRIAIGDCILSINEESTISVTNAQARAMLRRHSLIGPDIKITYVPAEHLEEFKISLGQQSGRVMALDIFSSYTGRDIPELPEREEGEGEESELQNTAYSNWNQPRRVELWREPSKSLGISIVGGRGMGSRLSNGEVMRGIFIKHVLEDSPAGKNGTLKPGDRIVEVDGMDLRDASHEQAVEAIRKAGNPVVFMVQSIINRPRKSPLPSLLHNLYPKYNFSSTNPFADSLQINADKAPSQSESEPEKAPLCSVPPPPPSAFAEMGSDHTQSSASKISQDVDKEDEFGYSWKNIRERYGTLTGELHMIELEKGHSGLGLSLAGNKDRSRMSVFIVGIDPNGAAGKDGRLQIADELLEINGQILYGRSHQNASSIIKCAPSKVKIIFIRNKDAVNQMAVCPGNAVEPLPSNSENLQNKETEPTVTTSDAAVDLSSFKNVQHLELPKDQGGLGIAISEEDTLSGVIIKSLTEHGVAATDGRLKVGDQILAVDDEIVVGYPIEKFISLLKTAKMTVKLTIHAENPDSQAVPSAAGAASGEKKNSSQSLMVPQSGSPEPESIRNTSRSSTPAIFASDPATCPIIPGCETTIEISKGRTGLGLSIVGGSDTLLGAIIIHEVYEEGAACKDGRLWAGDQILEVNGIDLRKATHDEAINVLRQTPQRVRLTLYRDEAPYKEEEVCDTLTIELQKKPGKGLGLSIVGKRNDTGVFVSDIVKGGIADADGRLMQGDQILMVNGEDVRNATQEAVAALLKVSEGSLSSFTFPLSGSSTSESLESSSKKNALASEIQGLRTVEMKKGPTDSLGISIAGGVGSPLGDVPIFIAMMHPTGVAAQTQKLRVGDRIVTICGTSTEGMTHTQAVNLLKNASGSIEMQVVAGGDVSVVTGHQQEPASSSLSFTGLTSSSIFQDDLGPPQCKSITLERGPDGLGFSIVGGYGSPHGDLPIYVKTVFAKGAASEDGRLKRGDQIIAVNGQSLEGVTHEEAVAILKRTKGTVTLMVLS

SEQ ID NO: 220 - DNA, 1542 bp, Homo sapiens
ggaatttctacaatggtgggctcagctctcaggagaggtgcccatgcatatgtctacctggtgagtaaggccagtcacatctccagaggccatcagcaccaggcctggggatcgaggcctcctgcagcagagtgtgccacccaaagagctccaggcagtgtggtggagctgctgggcaaatcctaccctcaggacgaccacagcaacctcacccggaaggtcctcaccagagttggcaggaacctgcacaaccagcagcatcaccctctgtggctgatcaaggagagggtgaaggagcacttctacaagcagtatgtgggccgctttgggaccccgttgttctcggtctacgacaacctttctccagtggtcacgacctggcagaactttgacagcctgctcatcccagctgatcaccccagcaggaagaagggggacaactattacctgaatcggactcacatgctgagagcgcacacgtctgcacaccagtgggacttgctgcacgcgggactggatgccttcctggtggtgggtgatgtctacaggcgtgaccagatcgactcccagcactaccctattttccaccagctggaggccgtgcggctcttctccaagcatgagttatttgctggtataaaggatggagaaagcctgcagctctttgaacaaagttctcgctctgcgcataaacaagagacacacaccatggaggccgtgaagcttgtagagtttgatcttaagcaaacgcttaccaggctcatggcacatctttttggagatgagctggagataagatgggtagactgctacttcccttttacacatccttcctttgagatggagatcaactttcatggagaatggctggaagttcttggctgcggggtgatggaacaacaactggtcaattcagctggtgctcaagaccgaatcggctgggcttttggcctaggattagaaaggctagccatgatcctctacgacatccctgatatccgtctcttctggtgtgaggacgagcgcttcctgaagcagttctgtgtatccaacattaatcagaaggtgaagtttcagcctcttagcaaatatccggctgtgatcaatgatatttcattctggttgccctctgagaattacgcagaaaatgatttctatgacttagtccgaacaattggaggagacctggtggaaaaggttgatctcatagacaagtttgtacatccaaagacgcacaagaccagccactgctaccgcatcacgtaccgccacatggaacggactctgtcccagagagaggtcaggcacatccaccaggccttgcaggaggctgcagtccagctgttgggtgtggagggcaggttctgatgtcaccacttcactcaggctgcagccctcttggggctccaggatttgctgaaagagaaaaagatatggtttgtgaactggggcatcaatcatcttttgataaatggatcagttttaggactttcagaaaataaaagatcgctcttgaaaaaaaaaaaaaaaaaaaaaaaaaaa

SEQ ID NO: 221 - protein, 451 aa, Homo sapiens
MVGSALRRGAHAYVYLVSKASHISRGHQHQAWGSRPPAAECATQRAPGSVVELLGKSYPQDDHSNLTRKVLTRVGRNLHNQQHHPLWLIKERVKEHFYKQYVGRFGTPLFSVYDNLSPVVTTWQNFDSLLIPADHPSRKKGDNYYLNRTHMLRAHTSAHQWDLLHAGLDAFLVVGDVYRRDQIDSQHYPIFHQLEAVRLFSKHELFAGIKDGESLQLFEQSSRSAHKQETHTMEAVKLVEFDLKQTLTRLMAHLFGDELEIRWVDCYFPFTHPSFEMEINFHGEWLEVLGCGVMEQQLVNSAGAQDRIGWAFGLGLERLAMILYDIPDIRLFWCEDERFLKQFCVSNINQKVKFQPLSKYPAVINDISFWLPSENYAENDFYDLVRTIGGDLVEKVDLIDKFVHPKTHKTSHCYRITYRHMERTLSQREVRHIHQALQEAAVQLLGVEGRF

SEQ ID NO: 222 - DNA, 1883 bp, Homo sapiens
tgaaggctggttgttcagactgagcttcctgcctgcctgtaccccgccaacagcttcagaagaaggtgactggtggctgcctgaggaataccagtgggcaagagaattagcatttctggagcatctgctgtctgagcagcccctgggtgcgtccactttctgggcacgtgaggttgggccttggccgcctgagcccttgagttggtcacttgaaccttgggaatattgagattatattctcctgccttttaaaaagatggacttcagcagaaatctttatgatattggggaacaactggacagtgaagatctggcctccctcaagttcctgagcctggactacattccgcaaaggaagcaagaacccatcaaggatgccttgatgttattccagagactccaggaaaagagaatgttggaggaaagcaatctgtccttcctgaaggagctgctcttccgaattaatagactggatttgctgattacctacctaaacactagaaaggaggagatggaaagggaacttcagacaccaggcagggctcaaatttctgcctacaggttccacttctgccgcatgagctgggctgaagcaaacagccagtgccagacacagtctgtacctttctggcggagggtcgatcatctattaataagggtcatgctctatcagatttcagaagaagtgagcagatcagaattgaggtcttttaagtttcttttgcaagaggaaatctccaaatgcaaactggatgatgacatgaacctgctggatattttcatagagatggagaagagggtcatcctgggagaaggaaagttggacatcctgaaaagagtctgtgcccaaatcaacaagagcctgctgaagataatcaacgactatgaagaattcagcaaaggggaggagttgtgtggggtaatgacaatctcggactctccaagagaacaggatagtgaatcacagactttggacaaagtttaccaaatgaaaagcaaacctcggggatactgtctgatcatcaacaatcacaattttgcaaaagcacgggagaaagtgcccaaacttcacagcattagggacaggaatggaacacacttggatgcaggggctttgaccacgacctttgaagagcttcattttgagatcaagccccaccatgactgcacagtagagcaaatctatgagattttgaaaatctaccaactcatggaccacagtaacatggactgcttcatctgctgtatcctctcccatggagacaagggcatcatctatggcactgatggacaggaggcccccatctatgagctgacatctcagttcactggtttgaagtgcccttcccttgctggaaaacccaaagtgttttttattcaggcttgtcagggggataactaccagaaaggtatacctgttgagactgattcagaggagcaaccctatttagaaatggatttatcatcacctcaaacgagatatatcccggatgaggctgactttctgctggggatggccactgtgaataactgtgtttcctaccgaaaccctgcagagggaacctggtacatccagtcactttgccagagcctgagagagcgatgtcctcgaggcgatgatattctcaccatcctgactgaagtgaactatgaagtaagcaacaaggatgacaagaaaaacatggggaaacagatgcctcagcctactttcacactaagaaaaaaacttgtcttcccttctgattgatggtgctattttgtttgttttgttttgttttgtttttttgagacagaatctcgctctgtcgcccaggctggagtgcagtggcgtgatctcggctcaccgcaagctccgcctcccgggttcaggccattctcctgct

SEQ ID NO: 223 - protein, 496 aa, Homo sapiens
MDFSRNLYDIGEQLDSEDLASLKFLSLDYIPQRKQEPIKDALMLFQRLQEKRMLEESNLSFLKELLFRINRLDLLITYLNTRKEEMERELQTPGRAQISAYRFHFCRMSWAEANSQCQTQSVPFWRRVDHLLIRVMLYQISEEVSRSELRSFKFLLQEEISKCKLDDDMNLLDIFIEMEKRVILGEGKLDILKRVCAQINKSLLKIINDYEEFSKGEELCGVMTISDSPREQDSESQTLDKVYQMKSKPRGYCLIINNHNFAKAREKVPKLHSIRDRNGTHLDAGALTTTFEELHFEIKPHDDCTVEQIYEILKIYQLMDHSNMDCFICCILSHGDKGIIYGTDGQEAPIYELTSQFTGLKCPSLAGKPKVFFIQACQGDNYQKGIPVETDSEEQPYLEMDLSSPQTRYIPDEADFLLGMATVNNCVSYRNPAEGTWYIQSLCQSLRERCPRGDDILTILTEVNYEVSNKDDKKNMGKQMPQPTFTLRKKLVFPSD

SEQ ID NO: 224 - DNA, 3547 bp, Homo sapiens
gcactcgcccggctcgcccgctttcgcacccagttcacgcgccacagctatgtgtccccgagccgcgcgggcgcccgcgacgctactcctcgccctgggcgcggtgctgtggcctgcggctggcgcctgggagcttacgattttgcacaccaacgacgtgcacagccggctggagcagaccagcgaggactccagcaagtgcgtcaacgccagccgctgcatgggtggcgtggctcggctcttcaccaaggttcagcagatccgccgcgccgaacccaacgtgctgctgctggacgccggcgaccagtaccagggcactatctggttcaccgtgtacaagggcgccgaggtggcgcacttcatgaacgccctgcgctacgatgccatggcactgggaaatcatgaatttgataatggtgtggaaggactgatcgagccactcctcaaagaggccaaatttccaattctgagtgcaaacattaaagcaaaggggccactagcatctcaaatatcaggactttatttgccatataaagttcttcctgttggtgatgaagttgtgggaatcgttggatacacttccaaagaaaccccttttctctcaaatccagggacaaatttagtgtttgaagatgaaatcactgcattacaacctgaagtagataagttaaaaactctaaatgtgaacaaaattattgcactgggacattcgggttttgaaatggataaactcatcgctcagaaagtgaggggtgtggacgtcgtggtgggaggacactccaacacatttctttacacaggcaatccaccttccaaagaggtgcctgctgggaagtacccattcatagtcacttctgatgatgggcggaaggttcctgtagtccaggcctatgcttttggcaaatacctaggctatctgaagatcgagtttgatgaaagaggaaacgtcatctcttcccatggaaatcccattcttctaaacagcagcattcctgaagatccaagcataaaagcagacattaacaaatggaggataaaattggataattattctacccaggaattagggaaaacaattgtctatctggatggctcctctcaatcatgccgctttagagaatgcaacatgggcaacctgatttgtgatgcaatgattaacaacaacctgagacacacggatgaaatgttctggaaccacgtatccatgtgcattttaaatggaggtggtatccggtcgcccattgatgaacgcaacaatggcacaattacctgggagaacctggctgctgtattgccctttggaggcacatttgacctagtccagttaaaaggttccaccctgaagaaggcctttgagcatagcgtgcaccgctacggccagtccactggagagttcctgcaggtgggcggaatccatgtggtgtatgatctttcccgaaaacctggagacagagtagtcaaattagatgttctttgcaccaagtgtcgagtgcccagttatgaccctctcaaaatggacgaggtatataaggtgatcctcccaaacttcctggccaatggtggagatgggttccagatgataaaagatgaattattaagacatgactctggtgaccaagatatcaacgtggtttctacatatatctccaaaatgaaagtaatttatccagcagttgaaggtcggatcaagttttccacaggaagtcactgccatggaagcttttctttaatatttctttcactttgggcagtgatctttgttttataccaatagccaaaaattctccttgcctttaatgtgtgaaactgcattttttcaagtgagattcaaatctgccttttaggacctggctttgtgacagcaaaaaccatctttacaggctcctagaagctgaaggttagagcattataaaatgaagagacagacatgattactcagggtcagcaacctagtgagttagaaaaaaaattaacatagggccctataaggagaaagccaactatgttaagtttacgtgtccaaattttaatgaaattttactaacaattttaaaccatatttttcttcttcatatccatttctaatccatcaaacagcttatgtttacataaaattttatcattcacaaggaagttttaagcacactgtctcatttgatatccacaacttatttttggtaggaaagagagatgtttttcccacctgtcagatgaaaaaactgaagctcaaaaagggttgacttgaccatacagctaatgctgacagatccaagacctagacctaggtcttttgaactcaagtccagcattctcaactatatcaagttactgttcagaatacttaatatctcctctcttcataattatcaatagccccaagctcatggatgacaaatctctgctttatttcttgtctctattttttcactttatagctcctgttataatagcaagtttaatggtataaacacaggataccatcctctcttgcaacacccatgtgcctttgatgagtcaggtagcaagctgtagtagataatgagaaaggccagaggctgcaaagacagtcaaaggacacgagagaaaggaaggggaagaacaggactccaggactgttttatattatagaaaagcaagagctaaagagcatttacacatgttaaacagatacttgttaagcatagtgcctgacacacggcattagctgttattttatgagattccatcagctctgcctctgtcctctttcttctaacatgaaggtatcatgagaagagaaccttctaacataagctgtaattctaaacctgcacttgtccctctccagcaagaggctagcactgaattcattctactcatactacacacccagttatggaatgtccagagttctcgaagaaaataaatgactttaggaagaggtatacattttttaagtcgctctgcctccaaatctgaacagtcactgtaaatcattcttaagcccagatatgagaacttctgctggaaagtgggaccctctgagtgggtggtcagaaaatacccatgctgatgaaatgacctatgcccaaagaacaaatacttaacgtgggagtggaaccacatgagcctgctcagctctgcataagtaattcaagaaatgggaggcttcaccttaaaaacagtgtgcaaatggcagctagaggttttgataggaagtatgtttgtttcttagtgtttacaaatattaagtactcttgatacaaaatatacttttaaacttcataacctttttataaaagttgttgcagcaaaataatagcctcggttctatgcatatatggattgctataaaaaatgtcaataagattgtacaaggaaaattagagaaagtcacatttagggtttattttttacacttggccagtaaaatagggtaaatcctattagaaattttttaaagaactttttttaagtttcctaaatctgtgtgtgtattgtgaagtggtataagaaatgactttgaaccactttgcaattgtagattcccaacaataaaattgaagat

SEQ ID NO: 225 - protein, 574 aa, Homo sapiens
MCPRAARAPATLLLALGAVLWPAAGAWELTILHTNDVHSRLEQTSEDSSKCVNASRCMGGVARLFTKVQQIRRAEPNVLLLDAGDQYQGTIWFTVYKGAEVAHFMNALRYDAMALGNHEFDNGVEGLIEPLLKEAKFPILSANIKAKGPLASQISGLYLPYKVLPVGDEVVGIVGYTSKETPFLSNPGTNLVFEDEITALQPEVDKLKTLNVNKIIALGHSGFEMDKLIAQKVRGVDVVVGGHSNTFLYTGNPPSKEVPAGKYPFIVTSDDGRKVPVVQAYAFGKYLGYLKIEFDERGNVISSHGNPILLNSSIPEDPSIKADINKWRIKLDNYSTQELGKTIVYLDGSSQSCRFRECNMGNLICDAMINNNLRHTDEMFWNHVSMCILNGGGIRSPIDERNNGTITWENLAAVLPFGGTFDLVQLKGSTLKKAFEHSVHRYGQSTGEFLQVGGIHVVYDLSRKPGDRVVKLDVLCTKCRVPSYDPLKMDEVYKVILPNFLANGGDGFQMIKDELLRHDSGDQDINVVSTYISKMKVIYPAVEGRIKFSTGSHCHGSFSLIFLSLWAVIFVLYQ

SEQ ID NO: 226 - DNA, 2688 bp, Homo sapiens
  modified_base (2675)..(2676): a, c, t, g, unknown or other
aagcttgcgcgccatgtaaggtaaagtgactgattctatagcaatccaattgttcctttgtctgcccgtttacatataacaatgttgtcaatgtttgattgaaaatacctagcaggcgacacacacacacctagctcctcaggcggagagcacccctttcttggccacccgggtatcccccagggagtacggggctcaaaacacccttttggagaacaaggtggaagcaaatttcaggaagtaaaacttcctgaaataaaataaaatatcgaatgccttgagacccatacattttcaggttttcctaattaaagcaattactttccaccacccctccaacctggaatcaccaacttggttagagaaactgatttttcttttttctttttttttcccaaaagagtacatctgatcattttagcctgcaactaatgatagagatattagggctagttaaccacagttttacaagactcctctcccgcgtgtgggccattgtcatgctgtcggtcccgcccacctgaaaggtctccccgccccgactggggtttgttgttgaagaaggagaatccccggaaaggctgagtctccagctcaaggtcaaaacgtccaaggccgaaagccctccagtttcccctggacaccttgctcctgcttctgctacgaccttctgggaacgcgaatttctcattttcttcttaaattgccattttcgctttaggagatgaatgttttcctttggctgttttggcaatgactctgaattaaagcgatgctaacgcctcttttccccctaattgttaaaagctatggactgcaggaagatggtccgcttctcttacagtgtgatttggatcatggccatttctaaagcctttgaactgggattagttgccgggctgggccatcaggaatttgctcgtccatctcggggagacctggccttcagagatgacagcatttggccccaggaggagcctgcaattcggcctcggtcttcccagcgtgtgctgcccatgggaatacagcacagtaaggagctaaacagaacctgctgcctgaatgggggaacctgcatgctggagtccttttgtgcctgccctccctccttctacggacggaactgtgagcacgatgtgcgcaaagagaactgtgggtctgtgccccatgacacctggctgcccaagaagtgttccctgtgtaaatgctggcacggtcagctccgctgctttcctcaggcatttctacccggctgtgatggccttgtgatggatgagcacctcgtggcttccaggactccagaactaccaccgtctgcacgtactaccacttttatgctagctggcatctgcctttctatacaaagctactattaatcgacattgacctatttccagaaatacaattttagatattatgcaaatttcatgacccgtaaaggctgctgctacaatgtcctaactgaaagatgatcatttgtagttgccttaaaataatgaatacaatttccaaaacggtctctaacatttccttacagaactaactacttcttacctctttgccctgccctctcccaaaaaactacttcttttttcaaaagaaagtcagccatatctccattgtgcccaagtccagtgtttcttttttttttttgagacggagtctcactctgtcacccaggctggactgcaatgacgcgatctcggttcactgcaacctccgcatccggggttcaagccattctcctgcctcagcctcccaagtagctgggattacaggcatgtgtcaccatgccggctaatttttttgtattttagtagagacgggggtttcaccatattggccagctggtctcgaactctgaccttgtgatccatcgctcgcctctcgagtgctgagattacacacgtgagcaactgtgcaaggcctggtgtttcttgatacatgtaattctaccaaggtcttcttaatatgttcttttaaatgattgaattatacactcagattattggagactaagtctaatgtggaccttagaatacagttttgagtagagttgatcaaaatcaattaaaatagtctctttaaaaggaaagaaaacatctttaaggggaggaaccagagtgctgaaggaatggaagtccatctgcgtgtgtgcagggagactgggtaggaaagaggaagcaaatagaagagagaggttgaaaaacaaaatgggttacttgattggtgattaggtggtggtagagaagcaagtaaaaaggctaaatggaagggcaagtttccatcatctatagaaagctatgtaagacaaggactcccctttttttcccaaaggcattgtaaaaagaatgaagtctccttagaaaaaaaattatacctcaatgtccccaacaagattgcttaataaattgtgtttcctccaagctattcaattcttttaactgttgtagaagagaaaatgttcacaatatatttagttgtaaaccaagtgatcaaactacatattgtaaagcccatttttaaaatacattgtatatatgtgtatgcacagtaaaaatggaaactatattgacctaaaaaaaaaaaaaggaaaccacccttaggcaggcaggacatgctcttcagaactctgctcttcagagttccaaagaagggataaaacatcttttatnnccatcaaatagc

SEQ ID NO: 227 - DNA, 2403 bp, Homo sapiens
cggctcgagcggctcgagtgaagagcctctccacggctcctgcgcctgagacagctggcctgacctccaaatcatccatccacccctgctgtcatctgttttcatagtgtgagatcaacccacaggaatatccatggcttttgtgctcattttggttctcagtttctacgagctggtgtcaggacagtggcaagtcactggaccgggcaagtttgtccaggccttggtgggggaggacgccgtgttctcctgctccctctttcctgagaccagtgcagaggctatggaagtgcggttcttcaggaatcagttccatgctgtggtccacctctacagagatggggaagactgggaatctaagcagatgccacagtatcgagggagaactgagtttgtgaaggactccattgcaggggggcgtgtctctctaaggctaaaaaacatcactccctcggacatcggcctgtatgggtgctggttcagttcccagatttacgatgaggaggccacctgggagctgcgggtggcagcactgggctcacttcctctcatttccatcgtgggatatgttgacggaggtatccagttactctgcctgtcctcaggctggttcccccagcccacagccaagtggaaaggtccacaaggacaggatttgtcttcagactccagagcaaatgcagatgggtacagcctgtatgatgtggagatctccattatagtccaggaaaatgctgggagcatattgtgttccatccaccttgctgagcagagtcatgaggtggaatccaaggtattgataggagagacgtttttccagccctcaccttggcgcctggcttctattttactcgggttactctgtggtgccctgtgtggtgttgtcatggggatgataattgttttcttcaaatccaaagggaaaatccaggcggaactggactggagaagaaagcacggacaggcagaattgagagacgcccggaaacacgcagtggaggtgactctggatccagagacggctcacccgaagctctgcgtttctgatctgaaaactgtaacccatagaaaagctccccaggaggtgcctcactctgagaagagatttacaaggaagagtgtggtggcttctcagggtttccaagcagggagacattactgggaggtggacgtgggacaaaatgtagggtggtatgtgggagtgtgtcgggatgacgtagacagggggaagaacaatgtgactttgtctcccaacaatgggtattgggtcctcagactgacaacagaacatttgtatttcacattcaatccccattttatcagcctcccccccagcacccctcctacacgagtaggggtcttcctggactatgagggtgggaccatctccttcttcaatacaaatgaccagtcccttatttataccctgctgacatgtcagtttgaaggcttgttgagaccctatatccagcatgcgatgtatgacgaggaaaaggggactcccatattcatatgtccagtgtcctggggatgagacagagaagaccctgcttaaagggccccacaccacagacccagacacagccaagggagagtgctcccgacaggtggccccagcttcctctccggagcctgcgcacagagagtcacgccccccactctcctttagggagctgaggttcttctgccctgagccctgcagcagcggcagtcacagcttccagatgaggggggattggcctgaccctgtgggagtcagaagccatggctgccctgaagtggggacggaatagactcacattaggtttagtttgtgaaaactccatccagctaagcgatcttgaacaagtcacaacctcccaggctcctcatttgctagtcacggacagtgattcctgcctcacaggtgaagattaaagagacaacgaatgtgaatcatgcttgcaggtttgagggcacagtgtttgctaatgatgtgtttttatattatacattttcccaccataaactctgtttgcttattccacattaatttacttttctctataccaaatcacccatggaatagttattgaacacctgctttgtgaggctcaaagaataaagaggaggtaggatttttcactgattctataagcccagcattacctgataccaaaaccaggcaaagaaaacagaagaagaggaaggaaaactacaggtccatatccctcattaacacagacacaaaaattctaaataaaattttaacaaattaaactaaacaatatatttaaagatgatatataactactcagtgtggtttgtcccacaaatgcagagttggtttaatatttaaatatcaaccagtgtaattcagcacattaataaagtaaaaaagaaaaccataaaaaaaaaaaaaaa

SEQ ID NO: 228 - protein, 466 aa, Homo sapiens
MAFVLILVLSFYELVSGQWQVTGPGKFVQALVGEDAVFSCSLFPETSAEAMEVRFFRNQFHAVVHLYRDGEDWESKQMPQYRGRTEFVKDSIAGGRVSLRLKNITPSDIGLYGCWFSSQIYDEEATWELRVAALGSLPLISIVGYVDGGIQLLCLSSGWFPQPTAKWKGPQGQDLSSDSRANADGYSLYDVEISIIVQENAGSILCSIHLAEQSHEVESKVLIGETFFQPSPWRLASILLGLLCGALCGVVMGMIIVFFKSKGKIQAELDWRRKHGQAELRDARKHAVEVTLDPETAHPKLCVSDLKTVTHRKAPQEVPHSEKRFTRKSVVASQGFQAGKHYWEVDVGQNVGWYVGVCRDDVDRGKNNVTLSPNNGYWVLRLTTEHLYFTFNPHFISLPPSTPPTRVGVFLDYEGGTISFFNTNDQSLIYTLLTCQFEGLLRPYIQHAMYDEEKGTPIFICPVSWG

SEQ ID NO: 229 - DNA, 210 bp, Homo sapiens
atgaggatcttttactatctccattttctgtgttatgtgaccttcattctaccagccacatgtaccttggtgaatgctgatcgttgcaccaaacgttacggtcgttgtaaaagagactgtcttgagagtgaaaagcaaatagacatatgttccttaccaagaaaaatttgctgcactgagaaattgtatgaagaagatgatatgttttga

SEQ ID NO: 230 - protein, 69 aa, Homo sapiens
MRIFYYLHFLCYVTFILPATCTLVNADRCTKRYGRCKRDCLESEKQIDICSLPRKICCTEKLYEEDDMF

SEQ ID NO: 231 - DNA, 420 bp, Homo sapiens
  modified_base (36)..(36): a, c, t, g, unknown or other
ctcttgtcagctgtctttcagaagacctggtggggnaagtccgtgggcatcatgttgaccgagctggagaaagccttgaactctatcatcgacgtctaccacaagtactccctgataaaggggaatttccatgccgtctacagggatgacctgaagaaattgctagagaccgagtgtcctcagtatatcaggaaaaagggtgcagacgtctggttcaaagagttggatatcaacactgatggtgcagttaacttccaggagttcctcattctggtgataaagatgggctggcagcccacaaaaaaagccatgaagaaagccacaaagagtagctgagttactgcccagaggctgggcccctgacatgtacctgcagaataataaagtcatcaatacctcaaaaaaaaaaaaaaaaaaaaa

SEQ ID NO: 232 - protein, 94 aa, Homo sapiens
MLTELEKALNSIIDVYHKYSLIKGNFHAVYRDDLKKLLETECPQYIRKKGADVWFKELDINTDGAVNFQEFLILVIKMGWQPTKKAMKKATKSS

SEQ ID NO: 233 - DNA, 832 bp, Homo sapiens
gcactcccaaagaactgggtactcaacactgagcagatctgttctttgagctaaaaaccatgtgctgtaccaagagtttgctcctggctgctttgatgtcagtgctgctactccacctctgcggcgaatcagaagcagcaagcaactttgactgctgtcttggatacacagaccgtattcttcatcctaaatttattgtgggcttcacacggcagctggccaatgaaggctgtgacatcaatgctatcatctttcacacaaagaaaaagttgtctgtgtgcgcaaatccaaaacagacttgggtgaaatatattgtgcgtctcctcagtaaaaaagtcaagaacatgtaaaaactgtggcttttctggaatggaattggacatagcccaagaacagaaagaaccttgctggggttggaggtttcacttgcacatcatggagggtttagtgcttatctaatttgtgcctcactggacttgtccaattaatgaagttgattcatattgcatcatagtttgctttgtttaagcatcacattaaagttaaactgtattttatgttatttatagctgtaggttttctgtgtttagctatttaatactaattttccataagctattttggtttagtgcaaagtataaaattatatttgggggggaataagattatatggactttcttgcaagcaacaagctattttttaaaaaaaactatttaacattcttttgtttatattgttttgtctcctaaattgttgtaattgcattataaaataagaaaaatattaataagacaaatattgaaaataaagaaacaaaaagttcttctgtta

SEQ ID NO: 234 - protein, 96 aa, Homo sapiens; identical to SEQ ID NO: 16

SEQ ID NO: 235 - DNA, 20 bp, Artificial sequence
  Description of artificial sequence: Synthetic probe
ctttggccatggtgcggagg

SEQ ID NO: 236 - DNA, 29 bp, Artificial sequence
  Description of artificial sequence: Synthetic probe
tgtgttggtagtgctgtgttgaattacgg

SEQ ID NO: 237 - DNA, 22 bp, Artificial sequence
  Description of artificial sequence: Synthetic probe
tgtgtgaaatcagtggccgcct

SEQ ID NO: 238 - DNA, 24 bp, Artificial sequence
  Description of artificial sequence: Synthetic probe
cacttgccattgcagaaggtcctg

SEQ ID NO: 239 - DNA, 21 bp, Artificial sequence
  Description of artificial sequence: Synthetic probe
ggcattcaaatgggctgctgc

SEQ ID NO: 240 - DNA, 26 bp, Artificial sequence
  Description of artificial sequence: Synthetic probe
ctggacggatggtagcagtctaggga

SEQ ID NO: 241 - DNA, 26 bp, Artificial sequence
  Description of artificial sequence: Synthetic probe
tccctgataaaggggaatttccatgc

SEQ ID NO: 242 - DNA, 23 bp, Artificial sequence
  Description of artificial sequence: Synthetic probe
tggcagtttctgagcagtcgtgc

SEQ ID NO: 243 - DNA, 19 bp, Artificial sequence
  Description of artificial sequence: Synthetic primer
catcccttgctgccattct

SEQ ID NO: 244 - DNA, 20 bp, Artificial sequence
  Description of artificial sequence: Synthetic primer
gaccttgaactgaatcttgc

SEQ ID NO: 245 - protein, 46 aa, Homo sapiens
PPPSHDQRGSSGHTPPPSGPPNMAVGNMSVLLRSLPGETQFLNSSA

SEQ ID NO: 246 - protein, 46 aa, Mucaca mulatta
PPPSHDQGGSSGHTPPPSGPPNMAVGNMSVLLRSLPGETQFLNSSA

SEQ ID NO: 247 - protein, 46 aa, Mus musculus
PPLSHEQGDSSKNTPSPSGPPNMAVGNMSVLLGSLPGETQFLNSSA

SEQ ID NO: 248 - protein, 46 aa, Rattus norvegicus
PPPSHEQGDSSKNTPPPSGPPNMAVGNMSVLLGSLPGETQFLNSSA

SEQ ID NO: 249 - protein, 46 aa, Canis familiaris
PPPSHDQGDSSEHTPPPSGPPNMAVGNMSILLGSLPGETQFLNSSA

SEQ ID NO: 250 - protein, 46 aa, Bos taurus
PPPSHNQRDSSEHTPPPSGTPNMAVGNMSVLLGSLPGETQFLNSSA

SEQ ID NO: 251 - protein, 4 aa, Artificial sequence
  Description of artificial sequence: Synthetic peptide
DEAH

SEQ ID NO: 252 - DNA, 19 bp, Artificial sequence
  Description of artificial sequence: Synthetic probe
agcgatgccagagagaata

SEQ ID NO: 253 - DNA, 20 bp, Artificial sequence
  Description of artificial sequence: Synthetic probe
ggaagtgattggggtctttg

SEQ ID NO: 254 - DNA, 20 bp, Artificial sequence
  Description of artificial sequence: Synthetic probe
actcccagtcttgtcattgc

SEQ ID NO: 255 - DNA, 20 bp, Artificial sequence
  Description of artificial sequence: Synthetic probe
caagtttcaaccagcaagaa

SEQ ID NO: 256 - DNA, 19 bp, Artificial sequence
  Description of artificial sequence: Synthetic probe
gctacccgtgagtccctct

SEQ ID NO: 257 - DNA, 20 bp, Artificial sequence
  Description of artificial sequence: Synthetic probe
tcttgcactgctttggtttc

SEQ ID NO: 258 - DNA, 20 bp, Artificial sequence
  Description of artificial sequence: Synthetic probe
agagctttgggctcaacaag

SEQ ID NO: 259 - DNA, 20 bp, Artificial sequence
  Description of artificial sequence: Synthetic probe
atgacagtgcaggtcccata

SEQ ID NO: 260 - DNA, 20 bp, Artificial sequence
  Description of artificial sequence: Synthetic probe
aagggaacttgagcgtgaat

SEQ ID NO: 261 - DNA, 20 bp, Artificial sequence
  Description of artificial sequence: Synthetic probe
gagtgcttccccttctcttg

SEQ ID NO: 262 - DNA, 20 bp, Artificial sequence
  Description of artificial sequence: Synthetic probe
cacttcgatgaggatgaacg

SEQ ID NO: 263 - DNA, 20 bp, Artificial sequence
  Description of artificial sequence: Synthetic probe
gtcccatacccaaagaatgg

SEQ ID NO: 264 - DNA, 19 bp, Artificial sequence
  Description of artificial sequence: Synthetic probe
ttgaccgagctggagaaag

SEQ ID NO: 265 - DNA, 20 bp, Artificial sequence
  Description of artificial sequence: Synthetic probe
tcaggtcatccctgtagacg

SEQ ID NO: 266 - DNA, 20 bp, Artificial sequence
  Description of artificial sequence: Synthetic probe
agagccgctggtgtatcttt

SEQ ID NO: 267 - DNA, 20 bp, Artificial sequence
  Description of artificial sequence: Synthetic probe
ccttctgcaggacaatgaag

SEQ ID NO: 268 - DNA, 1257 bp, Homo sapiens
atgaccgaagaaacacacccagacgatgacagctatattgtgcgtgtcaaggctgtggttatgaccagagatgactccagcgggggatggttcccacaggaaggaggcgggatcagtcgcgtcggggtctgtaaggtcatgcaccccgaaggcaatggacgaagcggctttctcatccatggtgaacgacagaaagacaaactggtggtattggaatgctatgtaagaaaggacttggtctacaccaaagccaatccaacgtttcatcactggaaggtcgataataggaagtttggacttactttccaaagccctgctgatgcccgagcctttgacaggggagtaaggaaagcaatcgaagaccttatagaaggttcaacaacgtcatcttccaccatccataatgaagctgagcttggcgatgatgacgtttttacaacagctacagacagttcttctaattcctctcagaagagagagcaacctactcggacaatctcctctcccacatcctgtgagcaccggaggatttataccctgggccacctccacgactcataccccacagaccactatcacctcgatcagccgatgccaaggccctaccgccaggtgagcttcccggacgacgacgaggagatcgtgcgcatcaacccccgggagaagatctggatgacggggtacgaggattaccggcacgcacccgtcaggggcaagtacccggacccctcggaggacgcggactcctcctacgtgcgcttcgccaagggcgaggtccccaagcatgactacaactacccctacgtggactcctcagactttggcctaggcgaggaccccaaaggccgcgggggcagcgtgatcaagacgcagccctcccggggcaagtcgcggcggcggaaggaggacggagagcgctcgcggtgcgtgtactgcagggacatgttcaaccacgaggagaaccgccggggccactgccaggacgcgcccgactccgtgagaacttgcatccgccgggtgagctgcatgtggtgcgcggacagcatgctctatcactgtatgtcggaccccgagggagactatacagacccttgctcgtgcgatactagcgacgagaagttttgcctccggtggatggctcttattgccttgtctttcctggccccctgtatgtgctgttacctgccccttcgggcctgctaccactgcggagtgatgtgcaggtgctgtggcgggaagcacaaagcggccgcgtga

SEQ ID NO: 269 - DNA, 609 bp, Homo sapiens
atggcagaaggtgaagaggaaggaggtgatgttctgattagtgttggccatgccaatgtgttaggatatactcttcgagaatttttacagcttttgcaacatatcactattggaacagtgctacaaatcaaggtttaccgagattttattaacattcctgaagaatggcaagaaatatatgatttaatccctgaggccaaattcccagtaacaagcacaccaaagaaaattgagctggcaaaagatgaatctttcacaagcagtgatgataatgaaaatgtagatttagataaaagacttcaatattatagatatccgtggtcaactgtgcatcaccctgcaaggagaccaatatccatctccagagactggcatggatataagaagaagaaccatactattagtgtaggaaaagacattaattgtgacgtgatgattcacagagacgacaagaaagaagtgagggccccttctccatactggataatggtgaagcaagacaatgaaagctcttcctcctctacctcctctacctcagatgcattttggctggaagattgtgcccaagttgaagagggtaaagcccaactggtatcaaaggttggttag

SEQ ID NO: 270 - DNA, 1257 bp, Homo sapiens; identical to SEQ ID NO: 268

SEQ ID NO: 271 - DNA, 609 bp, Homo sapiens; identical to SEQ ID NO: 269
